United States Patent Application Publication US 2009/0081658 A1 - sequence listing, part 4

SEQ ID NO: 6989 - DNA, 1797 bp, Homo sapiens
aagttattgtgagtgcctcgaggaccaaggaaccgttgaaatttccaatttcaggaagttccagtggatgcccatcaggaagattctcatgctgaacagaagggcaagagaggtggatctgtgagggaaaagacccaataggataactcaagttactgagataacaggaagagagcctggttaccatttggtggaacaatcctgctggctcaagcctctgcctagaaatttgggtcattctcttttttggacagtctggaaacctcgacctgtctcccagttggttgcacagcaggttactcagcagtttgtgcctcctacacagtcaaagaaagagaaaaaagataaagtagaaaaagaaaaaagtgaaaaggaaacaactagcaaaaagaatagccataagaaaaccaggccaagattgaaaaatgtggatcggagtagtgctcagcatttggaagttactgttggagatctgacagtcattattacagactttaaggagaaaacaaagtcaccgcctgcatctagtgctgcttctgcagatcaacacagtcaaagcggctctagctctgataacacagagagaggaatgtccaggtcatcttcacccagaggagaagcctcatcattgaatggagaatctcattaaagtttattttctccaatttcttagtcacttctgtcctaccatgcaaatacacagattatgccaagaggtaccacattttcatgacagatacattcatgcacaatccataatttgagttttacataaaatagaaatttgttagaatttgttagattttattgcaatgatgcctaccaaacatttccagacttaacattttggtctctgcagttaagtgccatgaaaatgtggttgaattattcattatgcagtgttattggtaagtgtattttcacttttagtttagtgaattctaacacataattcttgaattctctactattggcatgtaacgaatttaaattttttataacatagtgcaagctgcctaaatatgtattatttgagaattgtgaaacagatagttatatgtatacaagtcaaagaacaacttaactattgctgcaacaggtttttcttaatggttatcctcttaaatacacctgctggtacttggtgtggttaaataggaaaattgttattaaataaagaatttgtatgaacctttgccaatgtttttgacacgttttactaattattgttcctgaattatgtttctggttttatctattttttgaggtttttttgtttgcttatttttcaaaacattcatttattgtaatgtttactagcggactagtaaacaataaaacattgattatttagctttataattcaggtttagtgctattgtcattgaacactggtattttctgtatcatataaaacattaaaattcaaataattataagcatttggcaaaaacaagagaaaagaaacttgccatattttacaagctgcaattttagaaaagctttaacttaatgatagttttatcattgttttcttgtcccaaacttatccagggccatagaagtatgaatctaattaaaacagaaatgggaattattgcacagaaatgggaaataactaattttaaatcagtcaaattggcttcttattaaatacaataattcttatgaaaatcatagtaccctattttcagacacagctgccagtttacacatttctcagtatcctgaaaggaaaaaagtatagccccacttatactatgtaaaattaccaataaaatatttttatgactacag

SEQ ID NO: 6990 - protein, 46 aa, Homo sapiens; identical to SEQ ID NO: 6986

SEQ ID NO: 6991 - DNA, 1597 bp, Homo sapiens
aagttattgtgagtgcctcgaggaccaaggaaccgttgaaatttccaatttcaggaaggaaacctcgacctgtctcccagttggttgcacagcaggttactcagcagtttgtgcctcctacacagtcaaagaaagagaaaaaagataaagtagaaaaagaaaaaagtgaaaaggaaacaactagcaaaaagaatagccataagaaaaccaggccaagattgaaaaatgtggatcggagtagtgctcagcatttggaagttactgttggagatctgacagtcattattacagactttaaggagaaaacaaagtcaccgcctgcatctagtgctgcttctgcagatcaacacagtcaaagcggctctagctctgataacacagagagaggaatgtccaggtcatcttcacccagaggagaagcctcatcattgaatggagaatctcattaaagtttattttctccaatttcttagtcacttctgtcctaccatgcaaatacacagattatgccaagaggtaccacattttcatgacagatacattcatgcacaatccataatttgagttttacataaaatagaaatttgttagaatttgttagattttattgcaatgatgcctaccaaacatttccagacttaacattttggtctctgcagttaagtgccatgaaaatgtggttgaattattcattatgcagtgttattggtaagtgtattttcacttttagtttagtgaattctaacacataattcttgaattctctactattggcatgtaacgaatttaaattttttataacatagtgcaagctgcctaaatatgtattatttgagaattgtgaaacagatagttatatgtatacaagtcaaagaacaacttaactattgctgcaacaggtttttcttaatggttatcctcttaaatacacctgctggtacttggtgtggttaaataggaaaattgttattaaataaagaatttgtatgaacctttgccaatgtttttgacacgttttactaattattgttcctgaattatgtttctggttttatctattttttgaggtttttttgtttgcttatttttcaaaacattcatttattgtaatgtttactagcggactagtaaacaataaaacattgattatttagctttataattcaggtttagtgctattgtcattgaacactggtattttctgtatcatataaaacattaaaattcaaataattataagcatttggcaaaaacaagagaaaagaaacttgccatattttacaagctgcaattttagaaaagctttaacttaatgatagttttatcattgttttcttgtcccaaacttatccagggccatagaagtatgaatctaattaaaacagaaatgggaattattgcacagaaatgggaaataactaattttaaatcagtcaaattggcttcttattaaatacaataattcttatgaaaatcatagtaccctattttcagacacagctgccagtttacacatttctcagtatcctgaaaggaaaaaagtatagccccacttatactatgtaaaattaccaataaaatatttttatgactacag

SEQ ID NO: 6992 - protein, 46 aa, Homo sapiens; identical to SEQ ID NO: 6986

SEQ ID NO: 6993 - DNA, 1974 bp, Homo sapiens
ggtcgcggcggcgactctcggcgtgcggtgatagccaagccatgggagacaagaagagccccaccaggccgaagcggcagccgaagccgtcctcggatgagggttactgggactgtagcgtctgcaccttccggaacagcgccgaggccttcaagtgcatgatgtgcgatgtgcggaagggcacctccacccgatccacattgtttgaagttattgtgagtgcctcgaggaccaaggaaccgttgaaatttccaatttcaggaagagataacaggaagagagcctggttaccatttggtggaacaatcctgctggctcaagcctctgcctagaaatttgggtcattctcttttttggacagtctgcttctaaattactttaattgaagagcttcccaagattcaaggtgaatttaaagttaaaagattgtcatttgaaacctcgacctgtctcccagttggttgcacagcaggttactcagcagtttgtgcctcctacacagtcaaagaaagagaaaaaagataaagtagaaaaagaaaaaagtgaaaaggaaacaactagcaaaaagaatagccataagaaaaccaggccaagattgaaaaatgtggatcggagtagtgctcagcatttggaagttactgttggagatctgacagtcattattacagactttaaggagaaaacaaagtcaccgcctgcatctagtgctgcttctgcagatcaacacagtcaaagcggctctagctctgataacacagagagaggaatgtccaggtcatcttcacccagaggagaagcctcatcattgaatggagaatctcattaaagtttattttctccaatttcttagtcacttctgtcctaccatgcaaatacacagattatgccaagaggtaccacattttcatgacagatacattcatgcacaatccataatttgagttttacataaaatagaaatttgttagaatttgttagattttattgcaatgatgcctaccaaacatttccagacttaacattttggtctctgcagttaagtgccatgaaaatgtggttgaattattcattatgcagtgttattggtaagtgtattttcacttttagtttagtgaattctaacacataattcttgaattctctactattggcatgtaacgaatttaaattttttataacatagtgcaagctgcctaaatatgtattatttgagaattgtgaaacagatagttatatgtatacaagtcaaagaacaacttaactattgctgcaacaggtttttcttaatggttatcctcttaaatacacctgctggtacttggtgtggttaaataggaaaattgttattaaataaagaatttgtatgaacctttgccaatgtttttgacacgttttactaattattgttcctgaattatgtttctggttttatctattttttgaggtttttttgtttgcttatttttcaaaacattcatttattgtaatgtttactagcggactagtaaacaataaaacattgattatttagctttataattcaggtttagtgctattgtcattgaacactggtattttctgtatcatataaaacattaaaattcaaataattataagcatttggcaaaaacaagagaaaagaaacttgccatattttacaagctgcaattttagaaaagctttaacttaatgatagttttatcattgttttcttgtcccaaacttatccagggccatagaagtatgaatctaattaaaacagaaatgggaattattgcacagaaatgggaaataactaattttaaatcagtcaaattggcttcttattaaatacaataattcttatgaaaatcatagtaccctattttcagacacagctgccagtttacacatttctcagtatcctgaaaggaaaaaagtatagccccacttatactatgtaaaattaccaataaaatatttttatgactacag

SEQ ID NO: 6994 - protein, 96 aa, Homo sapiens; identical to SEQ ID NO: 6974

SEQ ID NO: 6995 - DNA, 1759 bp, Homo sapiens
attatcctccttattgacaaacagagcggtcgcggcggcgactctcggcgtgcggtgatagccaagccatgggagacaagaagagccccaccaggccgaagcggcagccgaagccgtcctcggatgagggttactgggactgtagcgtctgcaccttccggaacagcgccgaggccttcaagtgcatgatgtgcgatgtgcggaagggcacctccacccggaaacctcgacctgtctcccagttggttgcacagcaggttactcagcagtttgtgcctcctacacagtcaaagaaagagaaaaaagataaagtagaaaaagaaaaaagtgaaaaggaaacaactagcaaaaagaatagccataagaaaaccaggccaagattgaaaaatgtggatcggagtagtgctcagcatttggaagttactgttggagatctgacagtcattattacagactttaaggagaaaacaaagtcaccgcctgcatctagtgctgcttctgcagatcaacacagtcaaagcggctctagctctgataacacagagagaggaatgtccaggtcatcttcacccagaggagaagcctcatcattgaatggagaatctcattaaagtttattttctccaatttcttagtcacttctgtcctaccatgcaaatacacagattatgccaagaggtaccacattttcatgacagatacattcatgcacaatccataatttgagttttacataaaatagaaatttgttagaatttgttagattttattgcaatgatgcctaccaaacatttccagacttaacattttggtctctgcagttaagtgccatgaaaatgtggttgaattattcattatgcagtgttattggtaagtgtattttcacttttagtttagtgaattctaacacataattcttgaattctctactattggcatgtaacgaatttaaattttttataacatagtgcaagctgcctaaatatgtattatttgagaattgtgaaacagatagttatatgtatacaagtcaaagaacaacttaactattgctgcaacaggtttttcttaatggttatcctcttaaatacacctgctggtacttggtgtggttaaataggaaaattgttattaaataaagaatttgtatgaacctttgccaatgtttttgacacgttttactaattattgttcctgaattatgtttctggttttatctattttttgaggtttttttgtttgcttatttttcaaaacattcatttattgtaatgtttactagcggactagtaaacaataaaacattgattatttagctttataattcaggtttagtgctattgtcattgaacactggtattttctgtatcatataaaacattaaaattcaaataattataagcatttggcaaaaacaagagaaaagaaacttgccatattttacaagctgcaattttagaaaagctttaacttaatgatagttttatcattgttttcttgtcccaaacttatccagggccatagaagtatgaatctaattaaaacagaaatgggaattattgcacagaaatgggaaataactaattttaaatcagtcaaattggcttcttattaaatacaataattcttatgaaaatcatagtaccctattttcagacacagctgccagtttacacatttctcagtatcctgaaaggaaaaaagtatagccccacttatactatgtaaaattaccaataaaatatttttatgactacag

SEQ ID NO: 6996 - protein, 180 aa, Homo sapiens; identical to SEQ ID NO: 956

SEQ ID NO: 6997 - DNA, 2088 bp, Homo sapiens
gcttccgcccggcttattatcctccttattgacaaacagagcggtcgcggcggcgactctcggcgtgcggtgatagccaagccatgggagacaagaagagccccaccaggccgaagcggcagccgaagccgtcctcggatgagggttactgggactgtagcgtctgcaccttccggaacagcgccgaggccttcaagtgcatgatgtgcgatgtgcggaagggcacctccacccgtacatctaagctcttgtagatccaatttttagtggtggaaacattacttgaggaggactcagagaagcattgtcatttggattgaaactgaagaggctctgggcaactcaccagaaatctaagggacactgtgttcctgaaaatccacattgtttgaagttattgtgagtgcctcgaggaccaaggaaccgttgaaatttccaatttcaggaagttccagtggatgcccatcaggaagattctcatgctgaacagaagggcaagagaggtggatctgtgagggaaaagacccaataggataactcaagttactggaaacctcgacctgtctcccagttggttgcacagcaggttactcagcagtttgtgcctcctacacagtcaaagaaagagaaaaaagataaagtagaaaaagaaaaaagtgaaaaggaaacaactagcaaaaagaatagccataagaaaaccaggccaagattgaaaaatgtggatcggagtagtgctcagcatttggaagttactgttggagatctgacagtcattattacagactttaaggagaaaacaaagtcaccgcctgcatctagtgctgcttctgcagatcaacacagtcaaagcggctctagctctgataacacagagagaggaatgtccaggtcatcttcacccagaggagaagcctcatcattgaatggagaatctcattaaagtttattttctccaatttcttagtcacttctgtcctaccatgcaaatacacagattatgccaagaggtaccacattttcatgacagatacattcatgcacaatccataatttgagttttacataaaatagaaatttgttagaatttgttagattttattgcaatgatgcctaccaaacatttccagacttaacattttggtctctgcagttaagtgccatgaaaatgtggttgaattattcattatgcagtgttattggtaagtgtattttcacttttagtttagtgaattctaacacataattcttgaattctctactattggcatgtaacgaatttaaattttttataacatagtgcaagctgcctaaatatgtattatttgagaattgtgaaacagatagttatatgtatacaagtcaaagaacaacttaactattgctgcaacaggtttttcttaatggttatcctcttaaatacacctgctggtacttggtgtggttaaataggaaaattgttattaaataaagaatttgtatgaacctttgccaatgtttttgacacgttttactaattattgttcctgaattatgtttctggttttatctattttttgaggtttttttgtttgcttatttttcaaaacattcatttattgtaatgtttactagcggactagtaaacaataaaacattgattatttagctttataattcaggtttagtgctattgtcattgaacactggtattttctgtatcatataaaacattaaaattcaaataattataagcatttggcaaaaacaagagaaaagaaacttgccatattttacaagctgcaattttagaaaagctttaacttaatgatagttttatcattgttttcttgtcccaaacttatccagggccatagaagtatgaatctaattaaaacagaaatgggaattattgcacagaaatgggaaataactaattttaaatcagtcaaattggcttcttattaaatacaataattcttatgaaaatcatagtaccctattttcagacacagctgccagtttacacatttctcagtatcctgaaaggaaaaaagtatagccccacttatactatgtaaaattaccaataaaatatttttatgactacag

SEQ ID NO: 6998 - protein, 56 aa, Homo sapiens; identical to SEQ ID NO: 6978

SEQ ID NO: 6999 - DNA, 1196 bp, Homo sapiens
aagttattgtgagtgcctcgaggaccaaggaaccgttgaaatttccaatttcaggaagttccagtggatgcccatcaggaagattctcatgctgaacagaagggcaagagaggtggatctgtgagggaaaagacccaataggataactcaagttactgagataacaggaagagagcctggttaccatttggtggaacaatcctgctggctcaagcctctgcctagaaatttgggtcattctcttttttggacagtctggaaacctcgacctgtctcccagttggttgcacagcaggttactcagcagtttgtgcctcctacacagtcaaagaaagagaaaaaagataaagtagaaaaagaaaaaagtgaaaaggaaacaactagcaaaaagaatagccataagaaaaccaggccaagattgaaaaatgtggatcggagtagtgctcagcatttggaagttactgttggagatctgacagtcattattacagactttaaggagaaaacaaagtcaccgcctgcatctagtgctgcttctgcagatcaacacagtcaaagcggctctagctctgataacacagagagaggaatgtccaggtcatcttcacccagaggagaagcctcatcattgaatggagaatctcattaaagtttattttctccaatttcttagtcacttctgtcctaccatgcaaatacacagattatgccaagaggtaccacattttcatgacagatacattcatgcacaatccataatttgagttttacataaaatagaaatttgttagaatttgttagattttattgcaatgatgcctaccaaacatttccagacttaacattttggtctctgcagttaagtgccatgaaaatgtggttgaattattcattatgcagtgttattggtaagtgtattttcacttttagtttagtgaattctaacacataattcttgaattctctactattggcatgtaacgaatttaaattttttataacatagtgcaagctgcctaaatatgtattatttgagaattgtgaaacagatagttatatgtatacaagtcaaagaacaacttaactattgctgcaacaggtttttcttaatggttatcctcttaaatacacctgctggtacttggtgtggttaaataggaaaattgttattaaataaagaatttgtatgaaccttt

SEQ ID NO: 7000 - protein, 43 aa, Homo sapiens
MENLIKVYFLQFLSHFCPTMQIHRLCQEVPHFHDRYIHAQSII

SEQ ID NO: 7001 - DNA, 996 bp, Homo sapiens
aagttattgtgagtgcctcgaggaccaaggaaccgttgaaatttccaatttcaggaaggaaacctcgacctgtctcccagttggttgcacagcaggttactcagcagtttgtgcctcctacacagtcaaagaaagagaaaaaagataaagtagaaaaagaaaaaagtgaaaaggaaacaactagcaaaaagaatagccataagaaaaccaggccaagattgaaaaatgtggatcggagtagtgctcagcatttggaagttactgttggagatctgacagtcattattacagactttaaggagaaaacaaagtcaccgcctgcatctagtgctgcttctgcagatcaacacagtcaaagcggctctagctctgataacacagagagaggaatgtccaggtcatcttcacccagaggagaagcctcatcattgaatggagaatctcattaaagtttattttctccaatttcttagtcacttctgtcctaccatgcaaatacacagattatgccaagaggtaccacattttcatgacagatacattcatgcacaatccataatttgagttttacataaaatagaaatttgttagaatttgttagattttattgcaatgatgcctaccaaacatttccagacttaacattttggtctctgcagttaagtgccatgaaaatgtggttgaattattcattatgcagtgttattggtaagtgtattttcacttttagtttagtgaattctaacacataattcttgaattctctactattggcatgtaacgaatttaaattttttataacatagtgcaagctgcctaaatatgtattatttgagaattgtgaaacagatagttatatgtatacaagtcaaagaacaacttaactattgctgcaacaggtttttcttaatggttatcctcttaaatacacctgctggtacttggtgtggttaaataggaaaattgttattaaataaagaatttgtatgaaccttt

SEQ ID NO: 7002 - protein, 43 aa, Homo sapiens
MYYLRIVKQIVICIQVKEQLNYCCNRFFLMVILLNTPAGTWCG

SEQ ID NO: 7003 - DNA, 1373 bp, Homo sapiens
ggtcgcggcggcgactctcggcgtgcggtgatagccaagccatgggagacaagaagagccccaccaggccgaagcggcagccgaagccgtcctcggatgagggttactgggactgtagcgtctgcaccttccggaacagcgccgaggccttcaagtgcatgatgtgcgatgtgcggaagggcacctccacccgatccacattgtttgaagttattgtgagtgcctcgaggaccaaggaaccgttgaaatttccaatttcaggaagagataacaggaagagagcctggttaccatttggtggaacaatcctgctggctcaagcctctgcctagaaatttgggtcattctcttttttggacagtctgcttctaaattactttaattgaagagcttcccaagattcaaggtgaatttaaagttaaaagattgtcatttgaaacctcgacctgtctcccagttggttgcacagcaggttactcagcagtttgtgcctcctacacagtcaaagaaagagaaaaaagataaagtagaaaaagaaaaaagtgaaaaggaaacaactagcaaaaagaatagccataagaaaaccaggccaagattgaaaaatgtggatcggagtagtgctcagcatttggaagttactgttggagatctgacagtcattattacagactttaaggagaaaacaaagtcaccgcctgcatctagtgctgcttctgcagatcaacacagtcaaagcggctctagctctgataacacagagagaggaatgtccaggtcatcttcacccagaggagaagcctcatcattgaatggagaatctcattaaagtttattttctccaatttcttagtcacttctgtcctaccatgcaaatacacagattatgccaagaggtaccacattttcatgacagatacattcatgcacaatccataatttgagttttacataaaatagaaatttgttagaatttgttagattttattgcaatgatgcctaccaaacatttccagacttaacattttggtctctgcagttaagtgccatgaaaatgtggttgaattattcattatgcagtgttattggtaagtgtattttcacttttagtttagtgaattctaacacataattcttgaattctctactattggcatgtaacgaatttaaattttttataacatagtgcaagctgcctaaatatgtattatttgagaattgtgaaacagatagttatatgtatacaagtcaaagaacaacttaactattgctgcaacaggtttttcttaatggttatcctcttaaatacacctgctggtacttggtgtggttaaataggaaaattgttattaaataaagaatttgtatgaaccttt

SEQ ID NO: 7004 - protein, 96 aa, Homo sapiens; identical to SEQ ID NO: 6974

SEQ ID NO: 7005 - DNA, 1158 bp, Homo sapiens
attatcctccttattgacaaacagagcggtcgcggcggcgactctcggcgtgcggtgatagccaagccatgggagacaagaagagccccaccaggccgaagcggcagccgaagccgtcctcggatgagggttactgggactgtagcgtctgcaccttccggaacagcgccgaggccttcaagtgcatgatgtgcgatgtgcggaagggcacctccacccggaaacctcgacctgtctcccagttggttgcacagcaggttactcagcagtttgtgcctcctacacagtcaaagaaagagaaaaaagataaagtagaaaaagaaaaaagtgaaaaggaaacaactagcaaaaagaatagccataagaaaaccaggccaagattgaaaaatgtggatcggagtagtgctcagcatttggaagttactgttggagatctgacagtcattattacagactttaaggagaaaacaaagtcaccgcctgcatctagtgctgcttctgcagatcaacacagtcaaagcggctctagctctgataacacagagagaggaatgtccaggtcatcttcacccagaggagaagcctcatcattgaatggagaatctcattaaagtttattttctccaatttcttagtcacttctgtcctaccatgcaaatacacagattatgccaagaggtaccacattttcatgacagatacattcatgcacaatccataatttgagttttacataaaatagaaatttgttagaatttgttagattttattgcaatgatgcctaccaaacatttccagacttaacattttggtctctgcagttaagtgccatgaaaatgtggttgaattattcattatgcagtgttattggtaagtgtattttcacttttagtttagtgaattctaacacataattcttgaattctctactattggcatgtaacgaatttaaattttttataacatagtgcaagctgcctaaatatgtattatttgagaattgtgaaacagatagttatatgtatacaagtcaaagaacaacttaactattgctgcaacaggtttttcttaatggttatcctcttaaatacacctgctggtacttggtgtggttaaataggaaaattgttattaaataaagaatttgtatgaaccttt

SEQ ID NO: 7006 - protein, 180 aa, Homo sapiens; identical to SEQ ID NO: 956

SEQ ID NO: 7007 - DNA, 1487 bp, Homo sapiens
gcttccgcccggcttattatcctccttattgacaaacagagcggtcgcggcggcgactctcggcgtgcggtgatagccaagccatgggagacaagaagagccccaccaggccgaagcggcagccgaagccgtcctcggatgagggttactgggactgtagcgtctgcaccttccggaacagcgccgaggccttcaagtgcatgatgtgcgatgtgcggaagggcacctccacccgtacatctaagctcttgtagatccaatttttagtggtggaaacattacttgaggaggactcagagaagcattgtcatttggattgaaactgaagaggctctgggcaactcaccagaaatctaagggacactgtgttcctgaaaatccacattgtttgaagttattgtgagtgcctcgaggaccaaggaaccgttgaaatttccaatttcaggaagttccagtggatgcccatcaggaagattctcatgctgaacagaagggcaagagaggtggatctgtgagggaaaagacccaataggataactcaagttactggaaacctcgacctgtctcccagttggttgcacagcaggttactcagcagtttgtgcctcctacacagtcaaagaaagagaaaaaagataaagtagaaaaagaaaaaagtgaaaaggaaacaactagcaaaaagaatagccataagaaaaccaggccaagattgaaaaatgtggatcggagtagtgctcagcatttggaagttactgttggagatctgacagtcattattacagactttaaggagaaaacaaagtcaccgcctgcatctagtgctgcttctgcagatcaacacagtcaaagcggctctagctctgataacacagagagaggaatgtccaggtcatcttcacccagaggagaagcctcatcattgaatggagaatctcattaaagtttattttctccaatttcttagtcacttctgtcctaccatgcaaatacacagattatgccaagaggtaccacattttcatgacagatacattcatgcacaatccataatttgagttttacataaaatagaaatttgttagaatttgttagattttattgcaatgatgcctaccaaacatttccagacttaacattttggtctctgcagttaagtgccatgaaaatgtggttgaattattcattatgcagtgttattggtaagtgtattttcacttttagtttagtgaattctaacacataattcttgaattctctactattggcatgtaacgaatttaaattttttataacatagtgcaagctgcctaaatatgtattatttgagaattgtgaaacagatagttatatgtatacaagtcaaagaacaacttaactattgctgcaacaggtttttcttaatggttatcctcttaaatacacctgctggtacttggtgtggttaaataggaaaattgttattaaataaagaatttgtatgaaccttt

SEQ ID NO: 7008 - protein, 56 aa, Homo sapiens; identical to SEQ ID NO: 6978

SEQ ID NO: 7009 - DNA, 4994 bp, Homo sapiens
attatcctccttattgacaaacagagcggtcgcggcggcgactctcggcgtgcggtgatagccaagccatgggagacaagaagagccccaccaggccgaagcggcagccgaagccgtcctcggatgagggttactgggactgtagcgtctgcaccttccggaacagcgccgaggccttcaagtgcatgatgtgcgatgtgcggaagggcacctccacccgggacagcaaggaaggggggaagctggtgtcctactccacagccagtcttggggttagaggaaccctgagaaatagagtaggtggtggcagctcagaagagaagaaacaggctgaatacctggcacctggaagaagaaggaatatagtacacaggggagttggcccaggacagagaagtgggcctagtttaaaagaggcttgaggcccacatgggggcccctgacattttttttttttaccagtacatctaagctcttgtagatccaatttttagtggtggaaacattacttgaggaggactcagagaagcattgtcatttggattgaaactgaagaggctctgggcaactcaccagaaatctaagggacactgtgttcctgaaagtaagtgttctacaccacgaccctctcagcttcttccttcctctctctgaattctcttctcttttgattttggctctaagttaaacctaagagctctaatttctctgttatctgttattttcctagtggtttctgaaattcagggtagaatctgtgtttgtatagaacagtgtggaacagggtattgttactagagaagatattgattgcatcacagaatattaatatttttcctctctggtaatgttaaaaaaacaagattaaaggactgcagaacggtgttgagaagcaaaagtttcagtagttggaagaaataattctccataattgacttattaatgaacagggtaatttccagagtaaggttggcaagtactaaagccaagactggatagctgcagagcagaaggatgcagtttgctaatgatttgtttgtgtgacgcacagatgggatttgaatcctttgggtcagactgacctttgaactgattctgcctcattgccaaatgttaggccaagtctaagccattctagacatttgaaaaacttttttctttttagacctgcagagaagattgagtccttgttctacctttgaagtcttctttttttcttttttcttttttgagataagatctcattctgttgcccaggctgggttgcagtggcatcatccaggctcactgcagcctcgaactcccaggttcaaggaatcctcccacctcagcctcccaagtagctgaaactacagatgcacaccaccatgtgtggctaattttcttattttttgtagagatgggggatctctatgttgcctaggctagtctcaaactcttgagctcaagtgatcctcctaccttggcctcccaaagaactgggattataggaatgagccaccattcggcccctttaaagtctttattggcaatataattttttttctttaaataatattaagttcaaattctttatgcaacagaagcccatttcctttggctatatccatggtaggtcatgtctttctagagaacgaagttacattcatggcatgtatttcaaaataaaatgatttgttgtagcttcagttcctcaagttttaattttattttagattttggggtacatgtgcatgtttgttacttgggtatattgcagagtggtgggattgggattccagtgtacccattacccaaatggtgaacgttatacccaacaggtcatttttcagcccctcactccaaaattttttacattgtgcttttgtgagagaaacagtagtaaatgtcaaactgacaggaaattttttaaaaggaaacaaaatgccacggtgacacattattttcaagatgctgcacagtctttatatctgaagtttcttttctttcttttcttttcttttcttttcttttcttttcttttctctttttttttttgaggcagaatttgagacagtcttgctctgtcgcccaggctggagtacagtggcgtgacctcggctcactgcaacctccacctcccaggttcaagcaattctcatgcctcagcctctgtggtagctgggattacaggtgcccgccaccacaccaggctaatttttgtatttttagtagagatggggtttcactatgctggccaggctggtctcaaactcctgacctcaggtgatccgtctgcgtcggcttcccaaagtgctgggattacaggagtgagacactgtgcccagcctatctgaagattcttataaggcaagaaatgtcccaaatataaatgcaagaaactttaggaaattaaggatcattcttggctggcccagtggcccacacctgtaagcccagcaccttgggaggctgagacaggaggatttcttgaggccaggagtttgagaccaacctgggcaacacagtgagatctcgtctctactaaaaattaaaaaaattagctgggtgtggtggtgcatgcctgtggtcccagctactcaggaggctgaagtgggaggatcccttgagccccagagttcgaggttgcagtgagctgtgatcataccactgcactccagcctgggcaacagagtgagaccttgtctcaaaaaaacaaaattctgagtcatcagagaaaatgaaatattaaatattaaggatagtctgtatgagggtgataatcaatgtgtgatgattaatttaagactggtgtcttattggtacttcatctagtagtggacagttacttaatattgcttaattcagatagcaaatatttagaaatgaaaatgatagaattattggtttgggtttcaaactgtggtctaaatggttcataccaggctttcaaatgtaacaggtaatgttacattttgttagaggatattataacagtcctttaggtttctcataggtgttattttagagagctataaaaaagatttcacatagtagaaagagtgctagatgttacactagtatgattttggtaacctgggttcatatctcatttcatatcaaccatttcaatattcagcattcagcaaatgtttattgagcatcttatttaagggctgagttggatactagacatacagtggtgagcaaaatggatttttttgtttctttaaaattttacagttttgcaaattagaaccgctttaactgtaccaagctctatatgtgaggtttagtgttagtagatctttcctttatgtgtaggctgaagaggtggaacttcttcattaaaaatatatgttgtttataactgaacacagtattattattatggttaggtaaaaagagtgagttatttcagcttcttttaaaagtaagctataaaatccacattctgaaagaagcttaaaccaactatcatctggtagaaatcttttcagcatcgttgttttcttgtcatacttgctttatgtcttcaaatttgaggtttggcactgattcttctagacttttggtgtaggaatgggagaaaaaaattgaggaccatctacataagtcctttttaaagaaatgcatggttcctgagccgcctcctgtctatctgaggagcctttctagcaaccatttagttgttcagagactccttattctaggagatttcttacttgtttgttttttgtcctgtaagaggactcacactggttaattgtatatgggtaaattttacaagtgattattagtgtttgtgtagtctggatatcagagtggttttcaaagtgtagtctgagggacactgagagtccctgagatctttttagttgaagctttctatgaggttcacactgtttttataataatttgaagatgttatttgcctttttcactgtgatggtgcagaggcagtgatgggtaaaactgccagcaccttagcatgaatcaaagcagtggcaccaaattgctatcttcattgtaatattcaccaccatgtacatgcatgcagtaagaataatgtcagtttgaattaagaatatccttgaagcagaaaaatttactaattttattacatctcatatttttaaaaatattctgtctgaccaaatgggaactacacataaagcacttctactgtataccaaagtacagtggttaagggaaagcacatgtgtagtttgtcttgcaagcagagctagtctttttgtcatagagcatcatttttacttgaaagactacctgaaataccatagttattcagacttggatatttagcatatattttcttgaaaatgaatatattcaaaaaatatatcacttcaaggaaaacacttgatactatatgttgccagtgataatcattcaagtgaaaattagaatttttgaaaatttgtagcaacaatgagctttagagtttctgtgtataaagacttttctgagaagattagtggtggtatcaatgaatataatttctgatatttcaccatgaaatgtgtcagcatttggaagctacgcataactcagcaaacaaatggttcctagttaccgatgtatgattttacaaaactgtaatgggtaatccatcaaagtacaaaataccaacagattttaagggaacactgaaaacttcattgatgtggtttcagatttcatattgcaactaacctttgagaaacaactgtgtttttatgtagtatcaaagaataacacctatagttatctgaaaatgctattcaactacttacctcttttcaactgtatatctgtgagagtccagattttcttaatatttttggaccaaaacaacatattgcaacaaattgaatgctgagatagatgtgacaatccaggtgtcttctactaaccagatgttagaggtttgcaaaaatatacgatgccactcttcatacaaaatatctttgttttggaaaataataagtttttaaaataaaaatatgtcattt

SEQ ID NO: 7010 - protein, 117 aa, Homo sapiens
MGDKKSPTRPKRQPKPSSDEGYWDCSVCTFRNSAEAFKCMMCDVRKGTSTRDSKEGGKLVSYSTASLGVRGTLRNRVGGGSSEEKKQAEYLAPGRRRNIVHRGVGPGQRSGPSLKEA

SEQ ID NO: 7011 - DNA, 541 bp, Homo sapiens
caccgggcgcggcctgctggtgaccccgcgccgcgtcgtgtccgggttgtgtcctgcaggccgaagcggcagccgaagccgtcctcggatgagggttactgggactgtagcgtctgcaccttccggaacagcgccgaggccttcaagtgcatgatgtgcgatgtgcggaagggcacctccacccgggacagcaaggaaggggggaagctggtgtcctactccacagccagtcttggggttagaggaaccctgagaaatagagtaggtggtggcagctcagaagagaagaaacaggctgaatacctggcacctggaagaagaaggaatatagtacacaggggagttggcccaggacagagaagtgggcctagtttaaaagaggcttgaggcccacatgggggcccctgacattttttttttttaccagtacatctaagctcttgtagatccaatttttagtggtggaaacattacttgaggaggactcagagaagcattgtcatttggattgaaactgaagaggctctgggcaactcaccag

SEQ ID NO: 7012 - protein, 78 aa, Homo sapiens
MMCDVRKGTSTRDSKEGGKLVSYSTASLGVRGTLRNRVGGGSSEEKKQAEYLAPGRRRNIVHRGVGPGQRSGPSLKEA

SEQ ID NO: 7013 - DNA, 1003 bp, Homo sapiens
tagacgttcaactttgtaacttcaccttagtctctgagggccacagcttcatttacatgagaacttgaagatttttagtgttatgcctactctgccaattcttggaacatttgcggaactgagaatttacttcttcgtttattacttcctaactacattttaaagactcatttgttctagattcagatcattcaacaaaacatggcatgatttccacagtctctgacattctgattgcattgcttgagaaaattctcagtctgggaatctccttaaaatgcagcacagatgatggctgaataggaacagctccggtctgcagctcccagcgagatcaacgcagaaggcgggtgatttctgcatttccaactgagggtgtaacactgtgaccaacgaagagagtgttttctatcagtgactcgcagacttccctttcactggaatccagcttattagctgcatggttaactttggagccaggaaaacatcctgcacatgacactgccatcaagcagaggagacatgtttctcggcttcccctctctgggacttaatagcctctgaaggctagcctttactgactcatgaagctgtgtctgcctggggtcagtggtggagacattgcgttaaccccagcaagcgagccatcaccagagctttgcacagggagacaccacatagaaaggcagatgaggcaacacacacaccatccccagacagccatgggtccccagagacaggaaaaatatgtgttttcttaaagaattagaaaagaaaaccttgctttttcctgtgtggctcattggtaggagatctcaaattctaacccttgttttctcttttacctctctgtctgctaaaaagcactccttagatccagtatctagcatggtgagcctcctggatgcagtgctgcagtggccactgctgggtcaaaaacaaacactgggaaaggaggaaaatgatgtttttctctctttcaataaagcatttgaaatctcta

SEQ ID NO: 7014 - protein, 84 aa, Homo sapiens
MCFLKELEKKTLLFPVWLIGRRSQILTLVFSFTSLSAKKHSLDPVSSMVSLLDAVLQWPLLGQKQTLGKEENDVFLSFNKAFEI

SEQ ID NO: 7015 - DNA, 692 bp, Homo sapiens
gaccacttggggcccacccaatgaaagagagtttgaaacaagtccaaagaagagcaatgaaaataattaaatggttggaaaattgtctgtctaaataaaggtcacagacactgggcctatttaatgcagaaatatgaaggggcaaacctatccacattcctcaaggatgtgaaaagaaataggcagagagatcattttcttcagtttttcaatggaaaaaaaatacattcaaaagacgtcttcaccatacaaggaattctttgttcagactggctactgacattccaaacaaacctacactcaagataaagttatcctctcggaacactcagacatttttttttttcttccctatcatcaacttgccaacattaaaggcagttctcacttttagacacaacgtgtttgatgcaaatgcaacttaaagaagattactgtaaggtctcgcctggctggtcttgtattacatcctgattatgcatgtgctgtcacatgagagtggaagccaccaaataagtagctatggtcggtgaaaagtgaaatacgagtctttattattaagtgtccagtaagaggtgtggtgaaaagcaggactcccaaattgaactggtgaaaaatatgaactatctgcaccttacaagaaaataagcaaaaacctttcttctggacatcttaagtagtctttttttttt

SEQ ID NO: 7016 - protein, 61 aa, Homo sapiens
MQKYEGANLSTFLKDVKRNRQRDHFLQFFNGKKIHSKDVFTIQGILCSDWLLTFQTNLHSR

SEQ ID NO: 7017 - DNA, 645 bp, Homo sapiens
gttgcccaggctggagtgcagcagcacaatcgtagctaactgtagcctcagacccctgggcccaaccaatcctccttgtgagccacaattttaacacagatctgattgatatcaaaatacttagacactgtctctctgggctacacgctcctcaagagatcattttcttcagtttttcaatggaaaaaaaatacattcaaaagacgtcttcaccatacaaggaattctttgttcagactggctactgacattccaaacaaacctacactcaagataaagttatcctctcggaacactcagacatttttttttttcttccctatcatcaacttgccaacattaaaggcagttctcacttttagacacaacgtgtttgatgcaaatgcaacttaaagaagattactgtaaggtctcgcctggctggtcttgtattacatcctgattatgcatgtgctgtcacatgagagtggaagccaccaaataagtagctatggtcggtgaaaagtgaaatacgagtctttattattaagtgtccagtaagaggtgtggtgaaaagcaggactcccaaattgaactggtgaaaaatatgaactatctgcaccttacaagaaaataagcaaaaacctttcttctggacatcttaag

SEQ ID NO: 7018 - protein, 95 aa, Homo sapiens
LISKYLDTVSLGYTLLKRSFSSVFQWKKNTFKRRLHHTRNSLFRLATDIPNKPTLKIKLSSRNTQTFFFFFPIINLPTLKAVLTFRHNVFDANAT

SEQ ID NO: 7019 - DNA, 832 bp, Homo sapiens
cttggaatgttctacaaggtttatatcaactgagggttgaaaaatcctacttatccactctccttactttagagatgaggaatttgaatcttagagagtttatgacttatccaattggtggtattaccgaaaaccaaaagccagtttgcttcctagttgaatgttctttccatcatgccatgtggagttattttgagtcaaccagaaaatctgcaaggacatcaaaataatgttctttctccctctgacctcagtaataaccggttaaagatttagaatgctttagagtaaatcctcaaagcagctgcaggtcctcaatgttccagaatagatattttaagttctccaaataaaaaatcccaataaagaccttctttttgcagtaactaaaaaagtttccagctctcctgtcacaaagtggctattgagacttcaaatgtcagatgatctcctttgaagcagcaaaatagagtggatagaactccaggatggatgtcaaaaaactctgtgatcctagttctaactcaaatttacctttcatatggtatgaggttggcaacaaatgattcatggaccaccactcatctatagaccagacattagtaagatgtgcttgcttctccttcgcctttcaccatgactgtaagtttccagaggcctcccagtcatggttcctgttaagcttgcagaacgtgcacacaacctggagcaaagagatgtcaacgtagacttgaaagcctcaacaaacatctatacattcaaaattcagaggataattgcagacttacatgttaaatgatgccacaggcttgtggtgaatgtacaaatctaa

SEQ ID NO: 7020 - protein, 52 aa, Homo sapiens
MDHHSSIDQTLVRCACFSFAFHHDCKFPEASQSWFLLSLQNVHTTWSKEMST

SEQ ID NO: 7021 - DNA, 988 bp, Homo sapiens
ggattttgttatctatttgggatccccagagattccatatgaatggatgaagttttgctctgtccccaagctggaatgcagtggtgcaatcttggttcactgcaacctctgcctcccaggttcaagcgattctcctgtctcagcctcctgagtagctgggattacaggtgcatgccaccatgcccagctaatttttatatttttagtagagactgggtttcaccatgttggccaggctggtctcgaactcccgacctcaggtgatccgactgcctcagcctcccaaagtgctgggattacaagcatgagccactgcgcccagacttaatgatcattctttaacagccctttcttgatttgtgtgtttgtatgtgtgtgtgtgtgtgcgtgggtgtgaatgtaatgcatgtagtggaggtgtttcttatatattatttttccttttccttttttcttatgtctattactactccattttataacatttatattctatattagcaaaattgttatctcaaatttaatgtttgtaaggttcttgtcactaaccaatctatctttatagtttctctgtcagcagtttttttttataacagagttatttacttttttattcatgcttcttttcattcatcatcttttggtgtgtttctctctgtagtggatatcatgtttgctcatcgtttgaaatgtcttgttatatataacatttgtaagaaacatgttgaaattttatgctcacattttcaagctgcatttcaagctctttctcttggtctgtaataatcaatttataaggttatttcattcacaaactaaacttaaaaaattctgatatggcatgcttgttcatttgtatgtctggattctggtcatacttactctttatttttatttgtacacataaattatacttcatgaatatatattttcattcattaagaataaataaaacattaataaatcagcattctcttactttcaaagg

SEQ ID NO: 7022 - protein, 73 aa, Homo sapiens
MDEVLLCPQAGMQWCNLGSLQPLPPRFKRFSCLSLLSSWDYRCMPPCPANFYIFSRDWVSPCWPGWSRTPDLR

SEQ ID NO: 7023 - DNA, 2564 bp, Homo sapiens
gccatccctggggaacagaatgcaacccgggatctagagagctgtcacattccaagaaatatttaaattgtgctgattttcttctggagaactgagcccagggaatgaaactctccatcaagtcatggctttgcgggcaatagatcagaggatattgccagttttctaatggattattgttatcgggcaggttttctctgaagcttctcagctgctgttacattctacttggatgggaactggagatcagccagatcacttgtatgcacaaagctgctgtggatctgtctttcaaacaagagctgcagaaaacgctatagcaaggttgaagctttatccactctgactcacccagaaagcacagccctgattctgcgtgagaaaggctatctctacagaaactaaaacggtatcaacggtttctgtacagcacagattatgacagcgtctttcttaagcagatggaatcttggaacgtctcatgcttgggaaggacatggtcagatttgttgtaagaaagactgtgcagaggagtgtggcaaagggatccagaagatgcaaggtattatttagaaaagaagagaatgtttaaatttcatcaaatgaaacatatttttgaaatacttgataaaatgagatgcctgagaaaacgttctacagtgtcattcttgggagttcttgtcatttttctcctttttatgaacttgtacattgaagatagctatgttctggaaggagacaaacaacttataagggaaacatccacacatcaactgaattcagaacgctatgttcatactttcaaggatttatctaatttctcaggagccataaatgtcacctatcgctacctagctgccacacctttacaaagaaagcggtatcttacaattggactttcttcagtaaagcgaaaaaaaggaaactatttacttgagacaattaagtcaatttttgagcaatccagctatgaagagctgaaggaaatttcagtggtggttcacctagcagactttaattcttcctggcgtgatgccatggtccaggatattacacagaaatttgcgcaccatattattgcaggaagattaatggttatacatgctccagaggagtattacccaatcctagatggccttaaaagaaattacaatgatccagaagatagagtcaaatttcgttccaagcaaaatgtagattatgcttttctgcttaatttttgtgccaatacttcagactattatgtaatgcttgaagatgatgttcgatgttcaaaaaatttcttaactgccatcaagaaagtcattgcatccctagaaggaacttactgggtaactcttgaattctctaagcttggctacattggtaaactctatcattctcatgatctcccacgtttggcccattttttattaatgttttatcaagaaatgccttgtgattggctattgactcatttccgtggtctgttggctcagaaaaatgtgatccgttttaaaccatctctctttcagcacatgggctattattcatcatacaaagggacggagaataagctgaaggatgatgattttgaagaggagtcatttgacattcctgataacccccctgcaagtctgtacaccaacatgaatgtgtttgaaaattatgaagcaagcaaggcttacagtagtgttgatgagtacttttgggggaaaccaccttcaacaggagatgtttttgtgattgtatttgaaaatccaattataataaaaaaaattaaagtaaatactggaacagaagatcggcaaaatgatattttgcatcatggagccctagatgttggggaaaacgttatgcctagcaaacaaaggagacaatgttctacttacttaagactaggagaattcaaaaatggaaactttgaaatgtcaggtgtaaatcaaaaaattccatttgatatacattgtatgaggatatatgtcaccaaaacacaaaaggaatggctaattattaggagtattagcatttggacttcttagccaattaaatcagtatgttcagtttctgaagcagttcttcctgcttcgtcttttgctacctttgtcttttggagggaaagcaatggatgggatatgttaaaagaaacattaattacattggcagttttcatttatacattgttgacataattttactcttaatacacacttgtatttattttaacgtctgaagttgaatatcagtctatagctaatgctactttcatttatatttttaaatgttcttagttttaaaatttcaactgattgtcgaaagggtaatatgaaagattttaaatgaaaaaaatttgttggatgatgatttttgaaaaatagtcaccaactgtatatacttcctcaagaactgataattcattatatcatcagatagcttttattaagcatctgtgggaatatacagttgggggaatgataatctggtttattttttctgtaaacttaagtttccgttgacttctgtacatctacaatgaatacctcctcatagaagtggtgtctttacataattttttgtgtaggtga

SEQ ID NO: 7024 - protein, 478 aa, Homo sapiens
MFKFHQMKHIFEILDKMRCLRKRSTVSFLGVLVIFLLFMNLYIEDSYVLEGDKQLIRETSTHQLNSERYVHTFKDLSNFSGAINVTYRYLAATPLQRKRYLTIGLSSVKRKKGNYLLETIKSIFEQSSYEELKEISVVVHLADFNSSWRDAMVQDITQKFAHHIIAGRLMVIHAPEEYYPILDGLKRNYNDPEDRVKFRSKQNVDYAFLLNFCANTSDYYVMLEDDVRCSKNFLTAIKKVIASLEGTYWVTLEFSKLGYIGKLYHSHDLPRLAHFLLMFYQEMPCDWLLTHFRGLLAQKNVIRFKPSLFQHMGYYSSYKGTENKLKDDDFEEESFDIPDNPPASLYTNMNVFENYEASKAYSSVDEYFWGKPPSTGDVFVIVFENPIIIKKIKVNTGTEDRQNDILHHGALDVGENVMPSKQRRQCSTYLRLGEFKNGNFEMSGVNQKIPFDIHCMRIYVTKTQKEWLIIRSISIWTS

SEQ ID NO: 7025 - DNA, 2444 bp, Homo sapiens
gccatccctggggaacagaatgcaacccgggatctagagagctgtcacattccaagaaatatttaaattgtgctgattttcttctggagaactgagcccagggaatgaaactctccatcaagtcatggctttgcgggcaatagatcagaggatattgccagttttctaatggattattgttatcgggcaggttttctctgaagcttctcagctgctgttacattctacttggatgggaactggagatcagccagatcacttgtatgcacaaagctgctgtggatctgtctttcaaacaagagctgcagaaaacgctatagcaaggttgaagctttatccactctgactcacccagaaagcacagccctgattctgcgtgagaaaggctatctctacagaaactaaaacggtatcaacggtttctgtacagcacagattatgacagcgtctttcttaagaagagaatgtttaaatttcatcaaatgaaacatatttttgaaatacttgataaaatgagatgcctgagaaaacgttctacagtgtcattcttgggagttcttgtcatttttctcctttttatgaacttgtacattgaagatagctatgttctggaaggagacaaacaacttataagggaaacatccacacatcaactgaattcagaacgctatgttcatactttcaaggatttatctaatttctcaggagccataaatgtcacctatcgctacctagctgccacacctttacaaagaaagcggtatcttacaattggactttcttcagtaaagcgaaaaaaaggaaactatttacttgagacaattaagtcaatttttgagcaatccagctatgaagagctgaaggaaatttcagtggtggttcacctagcagactttaattcttcctggcgtgatgccatggtccaggatattacacagaaatttgcgcaccatattattgcaggaagattaatggttatacatgctccagaggagtattacccaatcctagatggccttaaaagaaattacaatgatccagaagatagagtcaaatttcgttccaagcaaaatgtagattatgcttttctgcttaatttttgtgccaatacttcagactattatgtaatgcttgaagatgatgttcgatgttcaaaaaatttcttaactgccatcaagaaagtcattgcatccctagaaggaacttactgggtaactcttgaattctctaagcttggctacattggtaaactctatcattctcatgatctcccacgtttggcccattttttattaatgttttatcaagaaatgccttgtgattggctattgactcatttccgtggtctgttggctcagaaaaatgtgatccgttttaaaccatctctctttcagcacatgggctattattcatcatacaaagggacggagaataagctgaaggatgatgattttgaagaggagtcatttgacattcctgataacccccctgcaagtctgtacaccaacatgaatgtgtttgaaaattatgaagcaagcaaggcttacagtagtgttgatgagtacttttgggggaaaccaccttcaacaggagatgtttttgtgattgtatttgaaaatccaattataataaaaaaaattaaagtaaatactggaacagaagatcggcaaaatgatattttgcatcatggagccctagatgttggggaaaacgttatgcctagcaaacaaaggagacaatgttctacttacttaagactaggagaattcaaaaatggaaactttgaaatgtcaggtgtaaatcaaaaaattccatttgatatacattgtatgaggatatatgtcaccaaaacacaaaaggaatggctaattattaggagtattagcatttggacttcttagccaattaaatcagtatgttcagtttctgaagcagttcttcctgcttcgtcttttgctacctttgtcttttggagggaaagcaatggatgggatatgttaaaagaaacattaattacattggcagttttcatttatacattgttgacataattttactcttaatacacacttgtatttattttaacgtctgaagttgaatatcagtctatagctaatgctactttcatttatatttttaaatgttcttagttttaaaatttcaactgattgtcgaaagggtaatatgaaagattttaaatgaaaaaaatttgttggatgatgatttttgaaaaatagtcaccaactgtatatacttcctcaagaactgataattcattatatcatcagatagcttttattaagcatctgtgggaatatacagttgggggaatgataatctggtttattttttctgtaaacttaagtttccgttgacttctgtacatctacaatgaatacctcctcatagaagtggtgtctttacataattttttgtgtaggtga

SEQ ID NO: 7026 - protein, 478 aa, Homo sapiens; identical to SEQ ID NO: 7024

SEQ ID NO: 7027 - DNA, 1888 bp, Homo sapiens
tggggaacagaatgcaacccgggatctagagagctgtcacattccaagaaatatttaaattgtgctgattttcttctggagaactgagcccagggaatgaaactctccatcaagtcatggctttgcgggcaatagatcagaggatattgccagttttctaatggattattgttatcgggcaggttttctctgaaggaactggagatcagccagatcacttgtatgcacaaagctgctgtggatctgtctttcaaacaagagctgcagaaaacgctatagcaaggttgaagctttatccactctgactcacccagaaagcacagccctgattctgcgtgagaaaggctatctctacagaaactaaaacggtatcaacggtttctgtacagcacagattatgacagcgtctttcttaagaagagaatgtttaaatttcatcaaatgaaacatatttttgaaatacttgataaaatgagatgcctgagaaaacgttctacagtgtcattcttgggagttcttgtcatttttctcctttttatgaacttgtacattgaagatagctatgttctggaaggagacaaacaacttataagggaaacatccacacatcaactgaattcagaacgctatgttcatactttcaaggatttatctaatttctcaggagccataaatgtcacctatcgctacctagctgccacacctttacaaagaaagcggtatcttacaattggactttcttcagtaaagcgaaaaaaaggaaactatttacttgagacaattaagtcaatttttgagcaatccagctatgaagagctgaaggaaatttcagtggtggttcacctagcagactttaattcttcctggcgtgatgccatggtccaggatattacacagaaatttgcgcaccatattattgcaggaagattaatggttatacatgctccagaggagtattacccaatcctagatggccttaaaagaaattacaatgatccagaagatagagtcaaatttcgttccaagcaaaatgtagattatgcttttctgcttaatttttgtgccaatacttcagactattatgtaatgcttgaagatgatgttcgatgttcaaaaaatttcttaactgccatcaagaaagtcattgcatccctagaaggaacttactgggtaactcttgaattctctaagcttggctacattggtaaactctatcattctcatgatctcccacgtttggcccattttttattaatgttttatcaagaaatgccttgtgattggctattgactcatttccgtggtctgttggctcagaaaaatgtgatccgttttaaaccatctctctttcagcacatgggctattattcatcatacaaagggacggagaataagctgaaggatgatgattttgaagaggagtcatttgacattcctgataacccccctgcaagtctgtacaccaacatgaatgtgtttgaaaattatgaagcaagcaaggcttacagtagtgttgatgagtacttttgggggaaaccaccttcaacaggagatgtttttgtgattgtatttgaaaatccaattataataaaaaaaattaaagtaaatactggaacagaagatcggcaaaatgatattttgcatcatggagccctagatgttggggaaaacgttatgcctagcaaacaaaggagacaatgttctacttacttaagactaggagaattcaaaaatggaaactttgaaatgtcaggtgtaaatcaaaaaattccatttgatatacattgtatgaggatatatgtcaccaaaacacaaaaggaatggctaattattaggagtattagcatttggacttcttagccaattaaatcagtatgttcagtttctg

SEQ ID NO: 7028 - protein, 478 aa, Homo sapiens; identical to SEQ ID NO: 7024

SEQ ID NO: 7029 - DNA, 1604 bp, Homo sapiens
tggggaacagaatgcaacccgggatctagagagctgtcacattccaagaaatatttaaattgtgctgattttcttctggagaactgagcccagggaatgaaactctccatcaagtcatggctttgcgggcaatagatcagaggatattgccagttttctaatggattattgttatcgggcaggttttctctgaaggaactggagatcagccagatcacttgtatgcacaaagctgctgtggatctgtctttcaaacaagagctgcagaaaacgctatagcaaggttgaagctttatccactctgactcacccagaaagcacagccctgattctgcgtgagaaaggctatctctacagaaactaaaacggtatcaacggtttctgtacagcacagattatgacagcgtctttcttaagaagagaatgtttaaatttcatcaaatgaaacatatttttgaaatacttgataaaatgagatgcctgagaaaacgttctacagtgtcattcttgggagttcttgtcatttttctcctttttatgaacttgtacattgaagatagctatgttctggaaggagacaaacaacttataagggaaacatccacacatcaactgaattcagaacgctatgttcatactttcaaggatttatctaatttctcaggagccataaatgtcacctatcgctacctagctgccacacctttacaaagaaagcggtatcttacaattggactttcttcagtaaagcgaaaaaaaggaaactatttacttgagacaattaagtcaatttttgagcaatccagctatgaagagctgaaggaaatttcagtggtggttcacctagcagactttaattcttcctggcgtgatgccatggtccaggatattacacagaaatttgcgcaccatattattgcaggaagattaatggttatacatgctccagaggagtattacccaatcctagatggccttaaaagaaattacaatgatccagaagatagagtcaaatttcgttccaagcaaaatgtagattatgcttttctgcttaatttttgtgccaatacttcagactattatgtaatgcttgaagatgatgttcgatgttcaaaaaatttcttaactgccatcaagaaagtcattgcatccctagaaggaacttactgggtaactcttgaattctctaagcttggctacattggtaaactctatcattctcatgatctcccacgtttggcccattttttattaatgttttatcaagaaatgccttgtgattggctattgactcatttccgtggtctgttggctcagaaaaatgtgatccgttttaaaccatctctctttcagcacatgggctattattcatcatacaaagggacggagaataagctgaaggatgatgattttgaagaggagtcatttgacattcctgataacccccctgcaagtctgtacaccaacatgaatgtgtttgaaaattatgaagcaagcaaggcttacagtagtgttgatgagtacttttgggggaaaccaccttcaacaggagatgtttttgtgattgtatttgaaaatccaattataataaaaaaaattaaagt

SEQ ID NO: 7030 - protein, 392 aa, Homo sapiens
MFKFHQMKHIFEILDKMRCLRKRSTVSFLGVLVIFLLFMNLYIEDSYVLEGDKQLIRETSTHQLNSERYVHTFKDLSNFSGAINVTYRYLAATPLQRKRYLTIGLSSVKRKKGNYLLETIKSIFEQSSYEELKEISVVVHLADFNSSWRDAMVQDITQKFAHHIIAGRLMVIHAPEEYYPILDGLKRNYNDPEDRVKFRSKQNVDYAFLLNFCANTSDYYVMLEDDVRCSKNFLTAIKKVIASLEGTYWVTLEFSKLGYIGKLYHSHDLPRLAHFLLMFYQEMPCDWLLTHFRGLLAQKNVIRFKPSLFQHMGYYSSYKGTENKLKDDDFEEESFDIPDNPPASLYTNMNVFENYEASKAYSSVDEYFWGKPPSTGDVFVIVFENPIIIKKI

SEQ ID NO: 7031 - DNA, 684 bp, Homo sapiens
gcagatgagagagtctggagcagagacaattttaacttagccattcctaatttatctcaagcgttttcaattcatcttcactgctctatgcacacaggaacaccagattgccatccctggggaacagaatgcaacccgggatctagagagctgtcacattccaagaaatatttaaattgtgctgattttcttctggagaactgagcccagggaatgaaactctccatcaagtcatggctttgcgggcaatagatcagaggatattgccagttttctaatggattattgttatcgggcaggttttctctgaaggaactggagatcagccagatcacttgtatgcacaaagctgctgtggatctgtctttcaaacaagagctgcagaaaacgctatagcaaggttgaagctttatccactctgactcacccagaaagcacagccctgattctgcgtgagaaaggctatctctacagaaactaaaacggtatcaacggtttctgtacagcacagattatgacagcgtctttcttaagatggaacaagttaaggttaccttctcaatatgaggactaaagcttttagccaatatttgtggagaagacacatttaagattttcttttgcccatacatgcaatgttatggaggctgtgaccacattttaggcaagaaactgaaagaacat

SEQ ID NO: 7032 - protein, 38 aa, Homo sapiens
MHTGTPDCHPWGTECNPGSRELSHSKKYLNCADFLLEN

SEQ ID NO: 7033 - DNA, 720 bp, Homo sapiens
gtccacggcttcattcttgaagtcagtgagaccaagaacccaccaattccggacacagtgtcaggcgcctgtagtcccagctcctcgggaggctgaggcaggagaatggcgtcaacctgggaggcggagcttgcagtgagccgagatcacgccactgcactccagcctgggcgactgagcaagactccgtctcaaaagaacagcaacaacaacaacaacaacaaaccatagtcctttgtcagtctttagtctactacttctgacctattaacagctcctggccttccatttctagttatcccagaaggacatactggaacaccttgcaggttacacactttgatggcactaactgcatgttagaattgtgtggcaaagaactgaaggcatcagtccaaaagcccaaagaactaaataccgccaacaaccccatgaacttggaagtgggtcctttcccagtgagctctggagatgacaaaagacagacaacaccttgattgtagtctgtgagaaaacctgaagcagaagacccagctaacttgtgctcagattcctgaccaatacaaattgtgagacaaatgtgtaattttttaagccaagtttttgataatgtaatatgaagtgatagataactaatacaaaatagagaactggatacatatgttcacgagctattctggcataaaaatacattcaataaaaaacttgttgctactctgt

SEQ ID NO: 7034 - protein, 46 aa, Homo sapiens [sequence omitted]

SEQ ID NO: 7035 - DNA, 661 bp, Homo sapiens
aggctcttcactgaaaagaatgccaaatgcctctggaagtaataaagagactgaactaatctaaaattgtttgaaacactcaagtcatttggaaccaatatatgttgtcgttatcccattccagtctatcctcattcctgtccatcctcaattaccgttcagagggtaaatgtgcagatttgttatgtaagtaaattgcatgtcacaggggtttgatgtatagagaattatgttacccaggtaatgaacatagtacctgattggtagtttttcaatcctcaccctcctcttaccctgtaccctcaagtaggccccagtgtctgctgttgccatgtttatgtccatgactacccaatgtttagcttccacttataagtgagaacatcctgtatttgcttctctgtttccgtgttagtttgctaaggataatggcctctagctccatccatgttgctgccaaggaaatgatttcattcttttttgtggctgcacagtatttcatggtgtatatgtatcacattttctttattcagtccactgaatattttgaatataacccctgcctatacacagtacttacaaaatctatatgaatgcaattgtaattgtcacatggaagaccatgttaaagcattaataaattcactatagctttttgata

SEQ ID NO: 7036 - protein, 30 aa, Homo sapiens
MLSLSHSSLSSFLSILNYRSEGKCADLLCK

SEQ ID NO: 7037 - DNA, 776 bp, Homo sapiens
ggctcttcactgaaaagaatgccaaatgcctctggaagtaataaagagactgaactaatctaaaattgtttgaaacactcaagtcatttggaaccaatatatgttgtcgttatcccattccagtctatcctcattcctgtccatcctcaattaccaaattatttggctgtaaagccagcaaagaaaaggaacagagcctacatcagagcttttacatgaaggaaatactgaaattggatacgacacatcaaaaatatttaaatatgaaactacagagactctggctgagttgcagcctctccagttcacatgctctctaacagaactcagtcttgatgagtgtttgcagaaaattgtcttcattgtcaaccacactccacaaaatgatggctaatttgacttttacagatttaaaaatttggaaagcatttgagattgcctgccaactccacagaactcttttcattaatcagtaaataaagttttatttaattttttcacaaagagaactttgtggtcatgaacgcctgctgtctgctccattaaaaataaagaagtcttctaaagagactctctcaaacatattcaaatacaggacttgggaagatatttcattctaatttaggagtacataattaatgtatttctttgcagctagcgtttaatgtcattgcttttatggcttatgatgtagtttgtttctttttatttaacagaaaggtcaatgtgactaataattagaactatgactgagagaagaagactgtaattagact

SEQ ID NO: 7038 - protein, 46 aa, Homo sapiens
MSVCRKLSSLSTTLHKMMANLTFTDLKIWKAFEIACQLHRTLFINQ

SEQ ID NO: 7039 - DNA, 3328 bp, Homo sapiens
ggcctgcggggcggggcctgggccaagcggcccgcaggaggcggcggcggccgttcagtcccttgttccccgccgccgccgtcgctgacccagcccgccaggcgctcctgaccgtcgcttcctccggtcccaggtccccggccctcgcctcagccccggcccctggtccccagccctcgtcgcagccccggccgcccgccgccgccatgtccaaggaggagcgccccggtcgggaggagatcctggagtgccaggtgatgtgggagcctgacagtaagaagaacacgcagatggaccgcttccgggcggctgtgggcgccgcctgcggcctggcgctggagagttatgatgacttgtaccattggtccgttgagtcatattcagacttctgggcagagttctggaaattcagtggaattgtcttctcacgtgtgtatgatgaggttgtggacacatcgaaaggaatcgcagatgtccccgagtggttcaaaggcagtcggctcaactatgcagaaaacctcctgcggcacaaagagaatgacagagttgccctttacattgcaagggaaggcaaagaggaaattgtgaaggtgacttttgaagagctgaggcaagaagtggctttgtttgcagcagcaatgaggaaaatgggtgtgaagaaaggagatcgggttgttggttatttacccaacagtgagcacgctgtcgaggcgatgctggctgcggcaagcattggtgccatctggagctccacgtccccggacttcggtgtgaatggtgtgctggaccggttttctcaaattcagccaaagctcatcttctctgtggaggctgttgtctataatggcaaagagcacaaccacatggaaaagctgcagcaggtggttaaaggcctaccagacttgaagaaagtggtggtgattccttatgtgtcctccagagagaacatagacctttcaaagattccaaacagtgtgtttctggatgactttcttgccaccggcaccagtgagcaggccccgcagctggagttcgagcagctgcccttcagccacccactgttcatcatgttctcatcgggcaccacgggcgcacccaagtgcatggtgcattccgctgggggcaccctcatccagcatctgaaggagcacctgctgcacggcaacatgaccagcagtgacatcctcctgtgctacaccacggtcggctggatgatgtggaactggatggtgtcccttctggccacaggagcggccatggtcttgtacgatggctcccccctggtgcccacgcccaatgtgctctgggacctggttgacaggataggcatcactgtcctggtaactggggccaagtggctgtcagtgctggaagagaaggccatgaagccggtggaaacccacagtctccagatgctccacacgatcctgtccactggctccccactgaaagcccagagctacgagtatgtctacaggtgcatcaagagcagcatcctcctgggctccatctcaggaggcaccgacatcatctcctgcttcatgggccacaatttttctcttcctgtgtataaaggggagattcaggcccggaacctgggcatggccgtggaagcgtggaacgaggaaggaaaggcggtctggggagagagcggcgagctggtgtgtactaagccgatcccttgccagcccacacacttctggaacgatgagaacggcaacaagtacaggaaggcgtatttctccaaattcccaggtatctgggctcatggcgactactgcagaatcaaccccaagaccgggggcatcgtcatgcttggccggagtgacggcaccctcaaccccaacggggtgcggttcggcagctcggaaatctataacattgtggaatccttcgaggaggtggaggacagcctgtgtgtcccccagtataacaagtacagggaggagagggtgatcctcttcctgaagatggcctccgggcacgccttccagcctgacttggttaagaggatccgtgacgccatccgcatgggcttgtctgcgcgacacgtgcccagcctcatcctggaaaccaagggcatcccgtatacgctcaacggcaagaaagtggaagttgccgtcaaacagatcatcgctggaaaagccgtggagcaaggaggtgctttctcgaaccccgagaccctggatctgtaccgggacatccctgagctgcagggcttctgagtcagactggctggcgtgtcactcagccgcacccgtgtgcactgtaacttttgtgtgctcaagaaattatacagaaacctacagctgttgtaaaaggatgctcgcaccaagtgttctgtaggcttggggagggatcgtttctctgttttgttaaatctggtgggtacctggatcttccacacgagtgggattctggccttcagagaccaggagggagtgtctgggccgcaggtgtggcactgtggtgagagtgtgtgtctttgcacacacagtgcagcgggaacggtggggctggctggtgctgaagacagacacactcctgagccaaggtcttgtcttcaacctccccgtcccgttgtcccattttgctctgtgaaggtgcaaatccctttcttcccttcccatctcaggctctcctgttttccctcagggtccagtatgcctttgagctttagctgttagaaaggaacccccgtgacttgacacagctttcacagctggctgctaggaccggcgggctgggtgttcacgtgtgtctgtgtcatggatgcaatgcaggccctggaggactgtgcgtcacccgtcaaccagagcgtgcctccgggccagcttccctccaaggaatgagtggatttcatacaggatctctttattgcacagactgaatggctttacatgtttctaatgtgaattaggcatgtgaagcagtgggtgtccacccgtgtccctcatgggtgagccctccagctgtgagcccaggcagtgtggtcaccgagtgaggaccctcctcaccaggaaccgcatccctgtgctgcctccacctgagagttgctagggggttcttgtcgagatcatgtcatcagcacccctaagtcaagtcacgggtttccatagccaggcagttggtatgtacaattcagttcagcgtatgaacttgtatctctaatctgatgtccatttttatattttttgaaactgagcacaatgaaatcctttcttgaatcattttccttttggattataaaaatatgggggaaagtgctatgatgaattttatgcaataaatgtatacatgtgtgcacatgcacccatgctgtgtgtgc

SEQ ID NO: 7040 - protein, 672 aa, Homo sapiens; identical to SEQ ID NO: 960

SEQ ID NO: 7041 - DNA, 3117 bp, Homo sapiens
gggcggggcctgggccaagcggcccgcaggaggcggcggcggccgttcagtcccttgttccccgccgccgccgtcgctgacccagcccgccaggcgctcctgaccgtcgcttcctccggtcccaggtccccggccctcgcctcagccccggcccctggtccccagccctcgtcgcagccccggccgcccgccgccgccatgtccaaggaggagcgccccggtcgggaggagatcctggagtgccaggtgatgtgggagcctgacagtaagaagaacacgcagatggaccgcttccgggcggctgtgggcgccgcctgcggcctggcgctggagagttatgatgacttgtaccattggtccgttgagtcatattcagacttctgggcagagttctggaaattcagtggaattgtcttctcacgtgtgtatgatgaggttgtggacacatcgaaaggaatcgcagatgtccccgagtggttcaaaggcagtcggctcaactatgcagaaaacctcctgcggcacaaagagaatgacagagttgccctttacattgcaagggaaggcaaagaggaaattgtgaaggtgacttttgaagagctgaggcaagaagtggctttgtttgcagcagcaatgaggaaaatgggtgtgaagaaaggagatcgggttgttggttatttacccaacagtgagcacgctgtcgaggcgatgctggctgcggcaagcattggtgccatctggagctccacgtccccggacttcggtgtgaatggtgtgctggaccggttttctcaaattcagccaaagctcatcttctctgtggaggctgttgtctataatggcaaagagcacaaccacatggaaaagctgcagcaggtggttaaaggcctaccagacttgaagaaagtggtggtgattccttatgtgtcctccagagagaacatagacctttcaaagattccaaacagtgtgtttctggatgactttcttgccaccggcaccagtgagcaggccccgcagctggagttcgagcagctgcccttcagccacccactgttcatcatgttctcatcgggcaccacgggcgcacccaagtgcatggtgcattccgctgggggcaccctcatccagcatctgaaggagcacctgctgcacggcaacatgaccagcagtgacatcctcctgtgctacaccacggtcggctggatgatgtggaactggatggtgtcccttctggccacaggagcggccatggtcttgtacgatggctcccccctggtgcccacgcccaatgtgctctgggacctggttgacaggataggcatcactgtcctggtaactggggccaagtggctgtcagtgctggaagagaaggccatgaagccggtggaaacccacagtctccagatgctccacacgatcctgtccactggctccccactgaaagcccagagctacgagtatgtctacaggtgcatcaagagcagcatcctcctgggctccatctcaggaggcaccgacatcatctcctgcttcatgggccacaatttttctcttcctgtgtataaaggggagattcaggcccggaacctgggcatggccgtggaagcgtggaacgaggaaggaaaggcggtctggggagagagcggcgagctggtgtgtactaagccgatcccttgccagcccacacacttctggaacgatgagaacggcaacaagtacaggaaggcgtatttctccaaattcccaggtatctgggctcatggcgactactgcagaatcaaccccaagaccgggggcatcgtcatgcttggccggagtgacggcaccctcaaccccaacggggtgcggttcggcagctcggaaatctataacattgtatacgctcaacggcaagaaagtggaagttgccgtcaaacagatcatcgctggaaaagccgtggagcaaggaggtgctttctcgaaccccgagaccctggatctgtaccgggacatccctgagctgcagggcttctgagtcagactggctggcgtgtcactcagccgcacccgtgtgcactgtaacttttgtgtgctcaagaaattatacagaaacctacagctgttgtaaaaggatgctcgcaccaagtgttctgtaggcttggggagggatcgtttctctgttttgttaaatctggtgggtacctggatcttccacacgagtgggattctggccttcagagaccaggagggagtgtctgggccgcaggtgtggcactgtggtgagagtgtgtgtctttgcacacacagtgcagcgggaacggtggggctggctggtgctgaagacagacacactcctgagccaaggtcttgtcttcaacctccccgtcccgttgtcccattttgctctgtgaaggtgcaaatccctttcttcccttcccatctcaggctctcctgttttccctcagggtccagtatgcctttgagctttagctgttagaaaggaacccccgtgacttgacacagctttcacagctggctgctaggaccggcgggctgggtgttcacgtgtgtctgtgtcatggatgcaatgcaggccctggaggactgtgcgtcacccgtcaaccagagcgtgcctccgggccagcttccctccaaggaatgagtggatttcatacaggatctctttattgcacagactgaatggctttacatgtttctaatgtgaattaggcatgtgaagcagtgggtgtccacccgtgtccctcatgggtgagccctccagctgtgagcccaggcagtgtggtcaccgagtgaggaccctcctcaccaggaaccgcatccctgtgctgcctccacctgagagttgctagggggttcttgtcgagatcatgtcatcagcacccctaagtcaagtcacgggtttccatagccaggcagttggtatgtacaattcagttcagcgtatgaacttgtatctctaatctgatgtccatttttatattttttgaaactgagcacaatgaaatcctttcttgaatcattttccttttggattataaaaatatgggggaaagtgctatgatgaattttatgcaataaatgtatacatgtgtgcacatgcacccatgctgtgtgtgc

SEQ ID NO: 7042 - protein, 599 aa, Homo sapiens
MSKEERPGREEILECQVMWEPDSKKNTQMDRFRAAVGAACGLALESYDDLYHWSVESYSDFWAEFWKFSGIVFSRVYDEVVDTSKGIADVPEWFKGSRLNYAENLLRHKENDRVALYIAREGKEEIVKVTFEELRQEVALFAAAMRKMGVKKGDRVVGYLPNSEHAVEAMLAAASIGAIWSSTSPDFGVNGVLDRFSQIQPKLIFSVEAVVYNGKEHNHMEKLQQVVKGLPDLKKVVVIPYVSSRENIDLSKIPNSVFLDDFLATGTSEQAPQLEFEQLPFSHPLFIMFSSGTTGAPKCMVHSAGGTLIQHLKEHLLHGNMTSSDILLCYTTVGWMMWNWMVSLLATGAAMVLYDGSPLVPTPNVLWDLVDRIGITVLVTGAKWLSVLEEKAMKPVETHSLQMLHTILSTGSPLKAQSYEYVYRCIKSSILLGSISGGTDIISCFMGHNFSLPVYKGEIQARNLGMAVEAWNEEGKAVWGESGELVCTKPIPCQPTHFWNDENGNKYRKAYFSKFPGIWAHGDYCRINPKTGGIVMLGRSDGTLNPNGVRFGSSEIYNIVYAQRQESGSCRQTDHRWKSRGARRCFLEPRDPGSVPGHP

SEQ ID NO: 7043 - DNA, 3131 bp, Homo sapiens
agattggaggttacatttcaacacgagatgagggtggggacaaacatccacactcttatcagcaccttcctctcaggctggctgggaggattaaataagctgctgctctgcaaagcgtgcacagtcagctctcagtgatcctgcctgtcattgtgcggccgcggtgggctctgtcgcctgaagcacctgagtcagggtgggcagattcttcacaggcaggcccgggtgcctgtcccatggactgtgggaccctgccgaccttaataaattataaccaggtgccagagcgctggctttctttcatgcaacctcggattttgtgccccaggtgtatggatggaggccatgatgcatggaggctaggaggaaaaccagacagggtttaccagccccctggttggcctggctattttttctgaataatattcatcagcagttgatataaaatgagggcatccagcagaatcatgttagccacttcatttagcccgacaccccaggggctggactcccactgcagtccatcctttgattgtggatgccacagataaagcagaaacgggtacgtgcccatctgtggagaattgacggggccgggggagccaccctgtgggcttttcattcttagaagagctttaacaaagtgtgtttctggatgactttcttgccaccggcaccagtgagcaggccccgcagctggagttcgagcagctgcccttcagccacccactgttcatcatgttctcatcgggcaccacgggcgcacccaagtgcatggtgcattccgctgggggcaccctcatccagcatctgaaggagcacctgctgcacggcaacatgaccagcagtgacatcctcctgtgctacaccacggtcggctggatgatgtggaactggatggtgtcccttctggccacaggagcggccatggtcttgtacgatggctcccccctggtgcccacgcccaatgtgctctgggacctggttgacaggataggcatcactgtcctggtaactggggccaagtggctgtcagtgctggaagagaaggccatgaagccgggtgagtgtgcctcttcagtactcattccctgtactgccaatcaaggaaattaaatccatcctatttcctgcttgcgagtgaggcttcaggcactgggtttagttttaatcttttggtgactctgcaccccagtggaaacccacagtctccagatgctccacacgatcctgtccactggctccccactgaaagcccagagctacgagtatgtctacaggtgcatcaagagcagcatcctcctgggctccatctcaggaggcaccgacatcatctcctgcttcatgggccacaatttttctcttcctgtgtataaaggggagattcaggcccggaacctgggcatggccgtggaagcgtggaacgaggaaggaaaggcggtctggggagagagcggcgagctggtgtgtactaagccgatcccttgccagcccacacacttctggaacgatgagaacggcaacaagtacaggaaggcgtatttctccaaattcccaggtatctgggctcatggcgactactgcagaatcaaccccaagaccgggggcatcgtcatgcttggccggagtgacggcaccctcaaccccaacggggtgcggttcggcagctcggaaatctataacattgtggaatccttcgaggaggtggaggacagcctgtgtgtcccccagtataacaagtacagggaggagagggtgatcctcttcctgaagatggcctccgggcacgccttccagcctgacttggttaagaggatccgtgacgccatccgcatgggcttgtctgcgcgacacgtgcccagcctcatcctggaaaccaagggcatcccgtatacgctcaacggcaagaaagtggaagttgccgtcaaacagatcatcgctggaaaagccgtggagcaaggaggtgctttctcgaaccccgagaccctggatctgtaccgggacatccctgagctgcagggcttctgagtcagactggctggcgtgtcactcagccgcacccgtgtgcactgtaacttttgtgtgctcaagaaattatacagaaacctacagctgttgtaaaaggatgctcgcaccaagtgttctgtaggcttggggagggatcgtttctctgttttgttaaatctggtgggtacctggatcttccacacgagtgggattctggccttcagagaccaggagggagtgtctgggccgcaggtgtggcactgtggtgagagtgtgtgtctttgcacacacagtgcagcgggaacggtggggctggctggtgctgaagacagacacactcctgagccaaggtcttgtcttcaacctccccgtcccgttgtcccattttgctctgtgaaggtgcaaatccctttcttcccttcccatctcaggctctcctgttttccctcagggtccagtatgcctttgagctttagctgttagaaaggaacccccgtgacttgacacagctttcacagctggctgctaggaccggcgggctgggtgttcacgtgtgtctgtgtcatggatgcaatgcaggccctggaggactgtgcgtcacccgtcaaccagagcgtgcctccgggccagcttccctccaaggaatgagtggatttcatacaggatctctttattgcacagactgaatggctttacatgtttctaatgtgaattaggcatgtgaagcagtgggtgtccacccgtgtccctcatgggtgagccctccagctgtgagcccaggcagtgtggtcaccgagtgaggaccctcctcaccaggaaccgcatccctgtgctgcctccacctgagagttgctagggggttcttgtcgagatcatgtcatcagcacccctaagtcaagtcacgggtttccatagccaggcagttggtatgtacaattcagttcagcgtatgaacttgtatctctaatctgatgtccatttttatattttttgaaactgagcacaatgaaatcctttcttgaatcattttccttttggattataaaaatatgggggaaagtgctatgatgaattttatgcaataaatgtatacatgtgtgcacatgcacccatgctgtgtgtgc

SEQ ID NO: 7044 - protein, 270 aa, Homo sapiens
MLHTILSTGSPLKAQSYEYVYRCIKSSILLGSISGGTDIISCFMGHNFSLPVYKGEIQARNLGMAVEAWNEEGKAVWGESGELVCTKPIPCQPTHFWNDENGNKYRKAYFSKFPGIWAHGDYCRINPKTGGIVMLGRSDGTLNPNGVRFGSSEIYNIVESFEEVEDSLCVPQYNKYREERVILFLKMASGHAFQPDLVKRIRDAIRMGLSARHVPSLILETKGIPYTLNGKKVEVAVKQIIAGKAVEQGGAFSNPETLDLYRDIPELQGF

SEQ ID NO: 7045 - DNA, 3578 bp, Homo sapiens
aggtgggctcccgtgcttccaagagctgaatggtgttgcatttcctaaccgtcttacctgcaccctggagatagatgggggactttgccgtttcttcagacaagcaggactgtgactcacaggccggagagcatcacctctgagtgctggcggagcttcaccaagatcagggtttgcagagtcttgcctgcacttagacgcactttagacccacagagagccttcgagttttctgggggtgggcagtggggggattgcacaaaacccgtgtgttgtttgggcgtggctgttgattggagagctttgtacctgtagctggaggtggtcactgctgctcagggccgggtgatcaccattagagtcatgaggtctccatcctctgttagtgatacttgcaaaggaagtgacaccttagtccttggctatgatgttgaagtagttaatcaaactctgagtttatgaaagaagcatgggggatggtgggaggagctagtctccctcccccaaaactccagccatctctagggtacagtggtggctttgttggtggcagggtgtgtctggggaagtaagagaacgaaggtgtgggaggtggaaggaccatggtaacccgcctccttgcgtggagggagacccaccctgccattgccttagccacgcccagcccagccagccctgaattccgggatgttctgtgccatgttgcctcgtggcttcagacagcgaatgctatgacggtcttccgtgggatgagtctctccaccgaatgtgcaggactgaggttctactgcccagagtgacccagaagagtctgaatctcacagcctcctctaggccccgaagagaataacgttctttagttgggccgactgagtttacatgtgaagggccgcctggctggaggaaaagctgaggaaggaaatagcatattagacagggctgcccttgaaagcgcagtgaggtatattcagcagcgtgtgttgttctgtgagcacaaatgcatagaacggtggattctgaatgttcaagaagagctggacttttctaagtttcataaaaatgtgatcttgtttaagaaaaggggatgggtggagagtttcaagtatggcacatgttttcacaaataaagaattctcccagcactttgggaggccaaagcaggaggagcacttgagcccaggagttcaagaccagcctggcaacatagcaagaccctgtctctcagctgggcatggtggcatacaccagtagctctagctacttgggaggctgaggtgggaaaatcacttgggcccaggagttggagactgcagtgagctgtgattgcacgactgcattccagcttggggcaacagaaggagaccctgtctaaaataataataataataattctgtagccttctcttcattggtgaatgaatgtgtgaggatagaatttgaggggacttgatttttatggcctcctttggtcccccaagatacaatactctgcagttgggaagataatgggttcgggtgagcgactgttttatgtgacgcctcgtggtaaagggagctggccctgcgtgctgaaatcagtgtaaagagcagtcaggtgcacctgtgaggaagtcaggtgccgtgactcagactcgagtaaacatgaagtatgagttcaacccagaaaactgctctctcttgggttttgcaaacttgtcagaaataaatcactaactttagaaagctttggtgcaagagccttgaagagtttctggtgttttctttcccgcctgcaccctagcatcactgtcctggtaactggggccaagtggctgtcagtgctggaagagaaggccatgaagccggtggaaacccacagtctccagatgctccacacgatcctgtccactggctccccactgaaagcccagagctacgagtatgtctacaggtgcatcaagagcagcatcctcctgggctccatctcaggaggcaccgacatcatctcctgcttcatgggccacaatttttctcttcctgtgtataaaggggagattcaggcccggaacctgggcatggccgtggaagcgtggaacgaggaaggaaaggcggtctggggagagagcggcgagctggtgtgtactaagccgatcccttgccagcccacacacttctggaacgatgagaacggcaacaagtacaggaaggcgtatttctccaaattcccaggtatctgggctcatggcgactactgcagaatcaaccccaagaccgggggcatcgtcatgcttggccggagtgacggcaccctcaaccccaacggggtgcggttcggcagctcggaaatctataacattgtatacgctcaacggcaagaaagtggaagttgccgtcaaacagatcatcgctggaaaagccgtggagcaaggaggtgctttctcgaaccccgagaccctggatctgtaccgggacatccctgagctgcagggcttctgagtcagactggctggcgtgtcactcagccgcacccgtgtgcactgtaacttttgtgtgctcaagaaattatacagaaacctacagctgttgtaaaaggatgctcgcaccaagtgttctgtaggcttggggagggatcgtttctctgttttgttaaatctggtgggtacctggatcttccacacgagtgggattctggccttcagagaccaggagggagtgtctgggccgcaggtgtggcactgtggtgagagtgtgtgtctttgcacacacagtgcagcgggaacggtggggctggctggtgctgaagacagacacactcctgagccaaggtcttgtcttcaacctccccgtcccgttgtcccattttgctctgtgaaggtgcaaatccctttcttcccttcccatctcaggctctcctgttttccctcagggtccagtatgcctttgagctttagctgttagaaaggaacccccgtgacttgacacagctttcacagctggctgctaggaccggcgggctgggtgttcacgtgtgtctgtgtcatggatgcaatgcaggccctggaggactgtgcgtcacccgtcaaccagagcgtgcctccgggccagcttccctccaaggaatgagtggatttcatacaggatctctttattgcacagactgaatggctttacatgtttctaatgtgaattaggcatgtgaagcagtgggtgtccacccgtgtccctcatgggtgagccctccagctgtgagcccaggcagtgtggtcaccgagtgaggaccctcctcaccaggaaccgcatccctgtgctgcctccacctgagagttgctagggggttcttgtcgagatcatgtcatcagcacccctaagtcaagtcacgggtttccatagccaggcagttggtatgtacaattcagttcagcgtatgaacttgtatctctaatctgatgtccatttttatattttttgaaactgagcacaatgaaatcctttcttgaatcattttccttttggattataaaaatatgggggaaagtgctatgatgaattttatgcaataaatgtatacatgtgtgcacatgcacccatgctgtgtgtgc

SEQ ID NO: 7046 - protein, 207 aa, Homo sapiens
MKPVETHSLQMLHTILSTGSPLKAQSYEYVYRCIKSSILLGSISGGTDIISCFMGHNFSLPVYKGEIQARNLGMAVEAWNEEGKAVWGESGELVCTKPIPCQPTHFWNDENGNKYRKAYFSKFPGIWAHGDYCRINPKTGGIVMLGRSDGTLNPNGVRFGSSEIYNIVYAQRQESGSCRQTDHRWKSRGARRCFLEPRDPGSVPGHP

SEQ ID NO: 7047 - DNA, 2055 bp, Homo sapiens
gaagacttacttgtgatccatgcaagaatgtttgtagcgccccatgatttgtaatggaaaacaaaattgggaacaatagaaatgtccatctttgagaggaagaaactctgtgatcacatgtggagaatgcccaagtggtgaatacgaatgaaccagagtgagacctagtagcccgaacgagcccagatgtcatgctgagtgagcacaggaagatgcgggacacatagaaggacagcgtgtatgtgttcaaaggcatgcagagtgacgacatatgctattcaaggatgcgtgtggatggagcagaaatgttaacacacatgggaataacaaatcactacgtccgagacagcgattttggggagcacacagggaggggacttcatctgggaggaacgcattattaggctgctgtgacaggtgtgtgggcgtggaccatctctgtacctttgtatatgtctggaatattgcataataagtaatagcttaagaaagagagagagacagccagggtgtgtggctgtggtgtgtgttgggcttatttttaattctcccataccaggaaaggcggtctggggagagagcggcgagctggtgtgtactaagccgatcccttgccagcccacacacttctggaacgatgagaacggcaacaagtacaggaaggcgtatttctccaaattcccaggtatctgggctcatggcgactactgcagaatcaaccccaagaccgggggcatcgtcatgcttggccggagtgacggcaccctcaaccccaacggggtgcggttcggcagctcggaaatctataacattgtatacgctcaacggcaagaaagtggaagttgccgtcaaacagatcatcgctggaaaagccgtggagcaaggaggtgctttctcgaaccccgagaccctggatctgtaccgggacatccctgagctgcagggcttctgagtcagactggctggcgtgtcactcagccgcacccgtgtgcactgtaacttttgtgtgctcaagaaattatacagaaacctacagctgttgtaaaaggatgctcgcaccaagtgttctgtaggcttggggagggatcgtttctctgttttgttaaatctggtgggtacctggatcttccacacgagtgggattctggccttcagagaccaggagggagtgtctgggccgcaggtgtggcactgtggtgagagtgtgtgtctttgcacacacagtgcagcgggaacggtggggctggctggtgctgaagacagacacactcctgagccaaggtcttgtcttcaacctccccgtcccgttgtcccattttgctctgtgaaggtgcaaatccctttcttcccttcccatctcaggctctcctgttttccctcagggtccagtatgcctttgagctttagctgttagaaaggaacccccgtgacttgacacagctttcacagctggctgctaggaccggcgggctgggtgttcacgtgtgtctgtgtcatggatgcaatgcaggccctggaggactgtgcgtcacccgtcaaccagagcgtgcctccgggccagcttccctccaaggaatgagtggatttcatacaggatctctttattgcacagactgaatggctttacatgtttctaatgtgaattaggcatgtgaagcagtgggtgtccacccgtgtccctcatgggtgagccctccagctgtgagcccaggcagtgtggtcaccgagtgaggaccctcctcaccaggaaccgcatccctgtgctgcctccacctgagagttgctagggggttcttgtcgagatcatgtcatcagcacccctaagtcaagtcacgggtttccatagccaggcagttggtatgtacaattcagttcagcgtatgaacttgtatctctaatctgatgtccatttttatattttttgaaactgagcacaatgaaatcctttcttgaatcattttccttttggattataaaaatatgggggaaagtgctatgatgaattttatgcaataaatgtatacatgtgtgcacatgcacccatgctgtgtgtgc

SEQ ID NO: 7048 - protein, 104 aa, Homo sapiens
MRTATSTGRRISPNSQVSGLMATTAESTPRPGASSCLAGVTAPSTPTGCGSAARKSITLYTLNGKKVEVAVKQIIAGKAVEQGGAFSNPETLDLYRDIPELQGF

SEQ ID NO: 7049 - DNA, 1920 bp, Homo sapiens
gtagagatgaggttttgccatgttggccaggctggtctcaaactcctgagctcaagtaatcaacccacttcggcctcccaaagtgctggaattacaggtgtgagccactgtgcccggccacctgcctccttttttgggaggccgacagggtctcactctgttggccaggctggggggcagtggcgccatcataactcactgtagcagcctgagcccggggcgcatctctgtctctgtgtggagagacactgccgcttctgttccctgggaagccagtgccattttcagcatttagggggttcctggtgagggctcaggagagatctgggcccagagccagccacactccttgtgttgagtaagactcatcccatctctgatctgtgacacgaggagaggagcccctcactcacccgccacagctcagggtggtgatgcggcaccattggagtgagcggccccgggggactggggaggctctggccggcgtagtccttgccgccagccttcacagcgggttctctgagggtctttatgcacaggggctctgtcacttagctctggccccccctctgcccctgaggcatgactttgggcaacgcagcatccaagcctcagtttccccatctctaagatgagttgacaacagagcctctctggtgggtgccgtgggccacagggtgcccagaacgcagtccccgtgcctctgtttctgtgctgcctccactcaccgtcagccttcattcggagtaggtgcgcatgctgtgcaaagcccttccacacacctgatctcagttgctctctgtgcaaaagtcagagaggctttccctgcatttcctgtttgaacagtgtcctggcctccatctttagctttgacagtgtttaccatgggggtgctgagggtgagttcttgtgtatgtgcacatctttctggtggagtggaggcctcttgaggacaggaaccttgtgggtctacctccttttcttcggagctcagctgactgcctggcaaacagcagatgcttttggtgtctggtgagtgaatggggggtggggagctggtcctgtgaccctggtgaggcgggacaaacttgtcttcctcacacccatcttacttcctcttatgaggaaacccagagagatgaggggtcttgcccaaggaaggggtgtccatagtcagctctgccttctgctcacccagaataaagacctggggaccccgcgagggtcatggccaagtggaatggactcctggcatttgagggcttcccgactgcagccctcaggcagccatggctgtcccaagtccagcgggcctttgctcgggtcatggctgggatgtctggcccttcctgacaggaggctgctgggctcctgtctacttggggacgcctcatgcaggagctggtgtgggggtgggcaggggggcggtggcttcttcctttctctttccctttcctctaccttttcccctctccccagaggaaatggtagcaggatttcttttaagaggatgctgctgtattttgccagcgggtggaaggtggcggtattagctcccgtgagctgcacgtggacccctgtgtgaagcgtagcagggcacagagcaggcgagacgtttgcatctcacagcgggagggccggcgacatcacatgaagtgacaggcaggcccttggaagccggtgcttagatccttaattagttcacacgtcgactgaattttcaagtgaatgaattttaattacatctcaggttaaaaaaaaaaaaaggcgccagtgatcgaggactcgtcactgggctctgttgctcctgaagtttcctagcccacaacacaccaacactgccaagggctcttctggattcaaggtgaaacacatgtgccataaatcttggagctctgaatgtttggaaagggcccg

SEQ ID NO: 7050 - protein, 154 aa, Homo sapiens
MRKPREMRGLAQGRGVHSQLCLLLTQNKDLGTPRGSWPSGMDSWHLRASRLQPSGSHGCPKSSGPLLGSWLGCLALPDRRLLGSCLLGDASCRSWCGGGQGGGGFFLSLSLSSTFSPLPRGNGSRISFKRMLLYFASGWKVAVLAPVSCTWTPV

SEQ ID NO: 7051 - DNA, 669 bp, Homo sapiens
cagcgaggagaccgcagccatcgccccacgagcccacacattgaggggcgcttacatctgagcagcttgccggtgctttatatatcgtttgtccacgttgcctagcaacgccatcctctccctgccatcctttttcctacccttcctaagactgcatttaaagcaacttctgctaaatacccatgttcagagggttagcaggcccagccctgcaggtccaactggcttctccctgctatcccctggttttagtgtattctcaaaatttttaatgagaacattaattttaactttttattttttattttatttttttgagaagagtgcgactctgtctcaaaaaaaaaaaaaagaaaaaaaaagaaaaaaagaaaaatgaacatgctcatggtgacctctgggcaactttgaaatagcctcagtttctcaacagccgtgccagggggcgggggtggggtgtggagagtgttagagttgagtttcagcaccagtccttgaaagtgcctttcagaagaacaggttttatcccccaaacagagagacagtggtcagttcaccgtacttcggtgcacgtttgcagacctggtgggaagaggggcatcttagagccgagacccattcactcttggcactccaggtggagctgggcctttggggcctggatatatc

SEQ ID NO: 7052 - protein, 35 aa, Homo sapiens
MRTLILTFYFLFYFFEKSATLSQKKKKEKKRKKEK

SEQ ID NO: 7053 - DNA, 873 bp, Homo sapiens
cctacagctgttgtaaaaggatgctcgcaccaagtgttctgtaggcttggggagggatcgtttctctgttttgttaaatctggtgggtacctggatcttccacacgagtgggattctggccttcagagaccaggagggagtgtctgggccgcaggtgtggcactgtggtgagagtgtgtgtctttgcacacacagtgcagcgggaacggtggggctggctggtgctgaagacagacacactcctgagccaaggtcttgtcttcaacctccccgtcccgttgtcccattttgctctgtgaaggtgcaaatccctttcttcccttcccatctcaggctctcctgttttccctcagggtccagtatgcctttgagctttagctgttagaaaggaacccccgtgacttgacacagctttcacagctggctgctaggaccggcgggctgggtgttcacgtgtgtctgtgtcatggatgcaatgcaggccctggaggactgtgcgtcacccgtcaaccagagcgtgcctccgggccagcttccctccaaggaatgagtggatttcatacacaccaggaaccgcatccctgtgctgcctccacctgagagttgctagggggttcttgtcgagatcatgtcatcagcacccctaagtcaagtcacgggtttccatagccaggcagttggtatgtacaattcagttcagcgtatgaacttgtatctctaatctgatgtccatttttatattttttgaaactgagcacaatgaaatcctttcttgaatcattttccttttggattataaaaatatgggggaaagtgctatgatgaattttatgcaataaatgtatacatgtgtgcacatgcacccatgctgtg

SEQ ID NO: 7054 - protein, 58 aa, Homo sapiens [sequence omitted]

SEQ ID NO: 7055 - DNA, 585 bp, Homo sapiens
ccttctttctctctgtagcctccctgtgcctgtctcctgctcccaccccagcacaacagagtctaggtctgttttccgctgctaagtgtgtgataatttattatgcagcaatagagcactaacacactcggccagtggcccaggcctcagtgtgcggcacactctacttagcacctccacatgtgtgagttctgtcttctcagccccactccggtccttgagggtgggaatcttcctcctttatctcctctgtatctcccaccccttggtcccaactacagggtaagggttcaaaaaagtgctcatttgaattcggcatagcactaagtcagtcagaactcttcagaggcaagtgacagaaagccatctctcatcactggcttcaggcacagcaggatatagggctgggtcaatgtaatcaggattcaacatctctcatggcatctgtatgggcagtagggcatagtggttaagaccatgggctctggaattgggttgctggataaaatacaggacacccagttaaatgcttcagtctttgtctttttgccgaagttccaacaaaaggcccgaagaggagtccca

SEQ ID NO: 7056 - protein, 35 aa, Homo sapiens
MGSGIGLLDKIQDTQLNASVFVFLPKFQQKARRGV

SEQ ID NO: 7057 - DNA, 303 bp, Homo sapiens
ggaggccaggaggacaagggatattgggggtgattcctgtgaaagataaaaggtggaggaagcagaactgggaagaaaagccttcagcccctgacatgaatctgacggcagctatcacagcgagacttgacctttgtacatcaaaggaggcttctttacaccccgcacagcttggaaggagtcagtgagcagaactaggcccagccgctgcctttggtttgtcttcctctgaaggaaaaatacgccagcaaagacaacgttctataaccccgtttgagtgtctcattacaattacataatgat

SEQ ID NO: 7058 - protein, 30 aa, Homo sapiens
MNLTAAITARLDLCTSKEASLHPAQLGRSQ

SEQ ID NO: 7059 - DNA, 5841 bp, Homo sapiens
atgagtggaatggctgaagttgctggtcagctcagagaaggtgtctctgagctaagaaatccagaccagaaggagtcttctctgctcacattgacagagagtcgagggattgtggatagcctgcagaagttttcctcgctccctgcttacctccccacgaacttgcacatctccaatgcagaggagtcctttttccttaaagaagccaaccaagacctcacaaggaactccagtctgcaggcccgggtggagccattcttcatctaccgagccaggacaccccctattatcaatgccagctatggcccattttcagtggagaagataatcccccaggagctcctgttgacatctacagcctttggaaacatggacaaatttcccttcaactggaaattgaaatcccacatccttgacagctccatctactccaacagacccaaagtgcagaccttgttttatgtcactggcatgggctgggatgacagtgaccttacggaagatctaccctgtgtcaagatgtttgctttccctgaggccagggaagtggcagccagctgtcggctgcaaggggccccagggctgtgtgtggctgagctggagctgctgcccgagtggttcagctcaggcctggacctggaaccagaggaggagatcccagccctgctcgggggcaccacgatggagctcttcttcacgctctacccagctgacaaggctggccagtgtcctctggaggaggaaggcaagtgggagaacaatatccactcgggcctggagagcccccagcaagcgtttccagcccgagagaggattgggagtgtggtggtctacccaacccaagatgatctgaagtggtccctggtgagcttggacgagaatgtggtcatctcggtacctctgaatctagtccgggaaggggacacggccacctttttggtctctctgaccagtagctctgtggcagaccagttcactcttagaattaaggcggcagcaggtgtgaagataacggcagtgagagtcagcagtgaggaccaatgggcagtccaggaggaaattgataatggcagcactcagacgtcggccaccctcacctgcatgggccatcgcccggacacgcagagcagggtaaatggatccttctatgagatcttgcaagtggactttggaattgataatagcagtgacctggctggggcccagcagattacctggcaggtggagtacccgattgaggactccatgagtgagctggtcgtctccgagatcttcgtcagccagacaaccttcgtgggcatcgtccctcttgccatggacaccgaggttttgaacactgccattctcactggaaagcctgtttcagttcctgtcaaagtcgtgggggtccaggaggatggttctgtggtcgatgtgtctgagtctgtggaatgcaagtctgccgatgaagatgtcattaaggtaaggggggatttatctacagctgtcctaagtgctcagagctttttgtcgttccttcttttgtctccaaggtcttgttctcactgagcatcccatgctctaaagggctggaggccagaatgacctcacgaaggaggaaacagctgaccgcagagactccctggaatcagcaggcggctgcagcaggtgatgctgcttccctctccctggaaaggggaatccctgacccttaatctccagcagaaagaatttattctcctccccttcttgtctcccctattcttctctctatctttcctcgtaagacaatattttcctaactttagcaatccaaataagaccttctcattttttgcaaactcactgtgcctaataatattatttactcaatatattttctttaaatgccttgcttctttcgggtagccagttagctcagtgggttagagtgtggtgctaataaatgcattactttttcaaacttaaaaactaatttagcttcattataagacaataaagtccgtgagcttggtgtattacattttttgttaatatgcattaaaataaataactattcaaataaaattaagttcacccatgtgccacctaactgaacttgaatataaccagtgggatacagtttaggaaatgggacatttctgctagattcttcactcaaattagctatgtttctgactccaaattctgctaggaaccagaaaatatttttttcatgctctctgaaggggtctttttgaaccaccaaatttaatatttctgcctattttttcttagcacattggttgctattgcttttgcagcagagacctcagggagaaaggatttgaatttttagaatgactgatccttcctcctttaaattattaagagagccccaaagtccaatctattcagctattttagaaaaatacaataactcagagttctgcccttcctcacattctacaagctcttgtttagaggttacatgaaacttggtctcagtattgaaaacttcgtggtagacaggaaaacctttaggggtttccctatagtagaaaaggtctgggaggggttgatttcttcttgttgtgacctacaggatgctgtgtcttaagcaagagacagtttcggaaaaaaagactgatgtattcgtgaggtctaattaacaaagaaattaattcctaggaaactcaagtttggcatagactctttcctggacatggaatgctcatcgtccttagatatggaaggtggactggcttaaaacctgcacacatagccctgcctggggttcctggtggtccttgtattctgtaggcaggtttgattaaatatatggccttaaatattcagagtttagaaagagctgagccaagtcacaggagattatatgcaccaatgacaaatatggatgatgaactgctgttggttgctattgacaatgcgcaagttttacactatttttactattcccatgtcattctagaaaggagacactgataagagatggtatctgtatgcttacgtcataatgggctcaaacaaatgattcagtctgtagtttcctaagccttttgttctgacctaagagcctgctatgaagccccatggggtggaatcctccttctcttgccctgaagagctctactctagaggggcaggtccaagttcacagatcccgttattgccatatacctggttttctccactccacacaaatgtactaaaagtatcctctgctcatcctcatagacgttgttttggaagatgatacctttttgctcagctgtcacctatatagcctcaggaggatggggattcgtctaacaaattattgcccagtcttcagaggaacaaagtgaaacctgcagatcgcaagctcagagctgtattcacactttttaaggggattccaggactgttgcaagtttgggggcttgtgtcaattgaggcgatttaattaaatggctgtgatgcatttactatggcttcagtgtcaatgtttgtagtaaattttactataactccaagttgaatggagttgtccacagagctatgaccttggcatcatcccagggacatcctcaaatacatggcacattcattagcaccctttggagagatcctctgagtctgtggagttgtcacacagtcatacttcagagtacagaaaacactgaatgatttttagggagagtcttgcagggctcaccaaagatctttgtgccttggaaccatgagttagataagggaaaaatgtgaatttagaaagatgtaagttatggtaatatccaaacaaatgaacttgtttggcctgtgattgtatgacttttgcgggacagaatcagaggacatacatgattttgaaaagctggaaccttggcctaatctggcaagattaaaagagataaatgtaaaatttcaagttgacaactatagtagtccttccttatctgtggtttcactttccgtggtttcatttcactgtggtcaatcacagtccaaaaacgttaaatgaaaattttcagaaagaagcaattcatgttttaaattgtgtactgttctgagtatcgtgaagaaatcttgagtcttcctgctccatcccacctgggttgtaactcatgactttgtctggcatatccatgctgtagataccacccacctctgagtcatttagtagctgcctgggtgatcaaatagactgtcgcggtatcacagtgcttgtgttcaagtcacccttatgttatttacaaatgaccccaaagtataagagtagtgatgctggcaattcggctagaccaacaagaagtcataaagtgcttcttttaagtgaaaaggtgagagttcttgacttaataaggaaggaaaaagatcatatgctggagttactaagatctacagtcagagcgaatcgtctatccatgaaatcgtgatgaaggaaaaaacattcatcgtagttttgctgtcacatctcaaatacaaaagttaaggccacagtgtgtgataaattcttcattaagatgtgaaaagacattaaatttaggtgaaagacatgaacagaaacttgttctgctggatgacagtctgattcagttctatctgtggtttcaggcatccactgggggtcttagactatattacccatggatgggaggagactgggagactgctgtacttttaggttaaaaaaaaaaaaaacaagtagaggattgtgtgtgtgtgtgtgtgtgtgtgtgcgcacacacacaagaagccttagcgtttttatcagtattgggatccagtgagtcaactgtttgataaggctgctacaggttgatttttattagcatgaatgggtgtgtgcctcagagcagaggtcacaggcaggcagtctgcagaccagatctgacccagaagtgtgtggggggtgcggggagggtctgcatagtttaaaaattgttacttaatttgttgcccccatgtaaaaattggcaagttcgcacagaaatctggatttacagtttcttatgaaaaatcacaggaccaggtggtcctgggtctccatgatttcctgtgaacctcgtctggagttgaagagaggatgctcctctgcataaaacctgtgccctccagctcactgtagtctccaccactcccttttgtctttcacatggaggttgaaggatatttgtcatttctggtcacacttgtgctcctagtttttgatagtggatttcagaggaaggtgagatattttttgtactccagtctctaaaaataaataagcaacaaatgatagacttcactctctcactctgatggagaattctgtatctttctaggccgtaagaagaacaataaaaaattgggttgtgctctgccaaaaagtgtctgagaggctgaggactcttgaaatcaaatcacaggagaaatgattgaaggaagtgtgagtgttaagcctattgatgagaagaaaaggctcaggggtgaggtggagagggagacatgacagctttttgtaagtctttcaagggccatcatgtagaagatggagtagctttgtgctttttagattccaagaatggaagttgaaaggtaccagttttagctcaatataaagaaaaagactgcagaggtagtgagttctttggttgagcttccagacatgtgatgttgctaaagatcctgactccaccttcctcaccgtttgaccttgggcaaattacttaccatctctgagcctagtttccttatctataaaatggggatggtaatgatacagtggaaacgtacttttctagagatttgttctaaagtcacagcaaacggcagaactaacaataaccaaactactccctaatccttgaaaatccccagtctcactgggtcatccag

SEQ ID NO: 7060 - protein, 515 aa, Homo sapiens
MSGMAEVAGQLREGVSELRNPDQKESSLLTLTESRGIVDSLQKFSSLPAYLPTNLHISNAEESFFLKEANQDLTRNSSLQARVEPFFIYRARTPPIINASYGPFSVEKIIPQELLLTSTAFGNMDKFPFNWKLKSHILDSSIYSNRPKVQTLFYVTGMGWDDSDLTEDLPCVKMFAFPEAREVAASCRLQGAPGLCVAELELLPEWFSSGLDLEPEEEIPALLGGTTMELFFTLYPADKAGQCPLEEEGKWENNIHSGLESPQQAFPARERIGSVVVYPTQDDLKWSLVSLDENVVISVPLNLVREGDTATFLVSLTSSSVADQFTLRIKAAAGVKITAVRVSSEDQWAVQEEIDNGSTQTSATLTCMGHRPDTQSRVNGSFYEILQVDFGIDNSSDLAGAQQITWQVEYPIEDSMSELVVSEIFVSQTTFVGIVPLAMDTEVLNTAILTGKPVSVPVKVVGVQEDGSVVDVSESVECKSADEDVIKVRGDLSTAVLSAQSFLSFLLLSPRSCSH

SEQ ID NO: 7061 - DNA, 7243 bp, Homo sapiens
gcggccgcgggctcccgctaaccgcagcctccactcctctccccgcgcgccgcgcccccgccccgccccgccccgcccggtctcgccggccgagcgtccgttggtccttgagcgcgtccgacagtctgtctgttcgcgatcctgccggagccccgccgccgccggcttggattctgaaaccttccttgtatccctcctgagacatctttgctgcaagatcgaggctgtcctctggtgagaaggtggtgaggcttcccgtcatattccagctctgaacagcaacatggggtgcaaagtcctgctcaacattgggcagcagatgctgcggcggaaggtggtggactgtagccgggaggagacgcggctgtctcgctgcctgaacacttttgatctggtggccctcggggtgggcagcacactgggtgctggtgtctacgtcctggctggagctgtggcccgtgagaatgcaggccctgccattgtcatctccttcctgatcgctgcgctggcctcagtgctggctggcctgtgctatggcgagtttggtgctcgggtccccaagacgggctcagcttacctctacagctatgtcaccgttggagagctctgggccttcatcaccggctggaacttaatcctctcctacatcatcggtacttcaagcgtagcgagggcctggagcgccaccttcgacgagctgataggcagacccatcggggagttctcacggacacacatgactctgaacgcccccggcgtgctggctgaaaaccccgacatattcgcagtgatcataattctcatcttgacaggacttttaactcttggtgtgaaagagtcggccatggtcaacaaaatattcacttgtattaacgtcctggtcctgggcttcataatggtgtcaggatttgtgaaaggatcggttaaaaactggcagctcacggaggaggattttgggaacacatcaggccgtctctgtttgaacaatgacacaaaagaagggaagcccggtgttggtggattcatgcccttcgggttctctggtgtcctgtcgggggcagcgacttgcttctatgccttcgtgggctttgactgcatcgccaccacaggtgaagaggtgaagaacccacagaaggccatccccgtggggatcgtggcgtccctcttgatctgcttcatcgcctactttggggtgtcggctgccctcacgctcatgatgccctacttctgcctggacaataacagccccctgcccgacgcctttaagcacgtgggctgggaaggtgccaagtacgcagtggccgtgggctccctctgcgctctttccgccagtcttctaggttccatgtttcccatgcctcgggttatctatgccatggctgaggatggactgctatttaaattcttagccaacgtcaatgataggaccaaaacaccaataatcgccacattagcctcgggtgccgttgctgctgtgatggccttcctctttgacctgaaggacttggtggacctcatgtccattggcactctcctggcttactcgttggtggctgcctgtgtgttggtcttacggtaccagccagagcagcctaacctggtataccagatggccagtacttccgacgagttagatccagcagaccaaaatgaattggcaagcaccaatgattcccagctgggctttttaccagaggcagagatgttctctttgaaaaccatactctcacccaaaaacatggagccttccaaaatctctgggctaattgtgaacatttcaaccagcctcatagctgttctcatcatcaccttctgcattgtgaccgtgcttggaagggaggctctcaccaaaggggcgctgtgggcagtctttctgctcgcagggtctgccctcctctgtgccgtggtcacgggcgtcatctggaggcagcccgagagcaagaccaagctctcatttaaggttcccttcctgccagtgctccccatcctgagcatcttcgtgaacgtctatctcatgatgcagctggaccagggcacctgggtccggtttgctgtgtggatgctgataggcttcatcatctactttggctatggcctgtggcacagcgaggaggcgtccctggatgccgaccaagcaaggactcctgacggcaacttggaccagtgcaagtgacgcacagccccgccccccggaggtggcagcagccccgagggacgcccccagaggaccgggaggcaccccaccctccccaccagtgcaacagaaaccacctgcgtccacaccctcactgcagccaaaggtgcaattacttgacctgcagccccagcccaccctcggctctgcagccggttctccgggccctggtcacctccagacagctgcctggccggggccactaggctgcggctggccactgtgtctcctcacttctctgaacaaagcagttcctcccctaccagctcagccccgagctgccgcagcctcaggcagaacggaggtcaccttctctccttatcttgggaaccaggccttcctcccggggactgttctgggattgaaattgtgcatactccaaactttcgcagccatcttcccgctcagccccagacacccagcaatcaagccagatgagtaccacaaaacagtgtgtccccagcagctccccaccccagagccaaatgacagtagtgcacttaaaaaggaaaatcaggcctgttgtccttctccggttgcattcagatgggtcattagggccggaccctgcctgccccttggcttctcagggctttgctctgacaccatgacagctgcccggggctgagggcagctggctccactcaaatgaggaagaagggatcactcccattagggcctgctttgcttatgcatgtgtgtgcacatgcatgtaaaccagggaccttcagctcacggcctccaggcctgggccagttcttgctgctcctgccgtctcccccgactggctgtgtcctgagtaactggaacatgagacagtatctgcaggactggccccatggtggccgagtcagaagtctgtttcctgtgagtcgccaccgttcactcagtcttgccctcccatgctttggagccagtctggtggctcctgtaaggttctcaaggctggtggcagctcagtctggggtcaggacatgtcggggtcatgcgtttctggccctgacataagctgtctggcctctctgtgacatgatgaaattgaaatcaatccacagtccatgaaattgtgacactccaccagattaagttagggcataacattaacttggaaatggccatgtcatcacccctgcggctgtcctatagctgagatgcgtgggtcgcaggggaggtgatttctaggcatattgctgtcccttttgtgtatctgtcatccggatgcttcggaccccacgcctctgcaagtgggagagacccgagcatcctccccacccccatagctccagtgcacgccacccccgtcttgcctgggtcggggcctgcggccagcaccatttcacacacactccttgtagatgggagccagaggaaacctgaacgtgggtggagcgttccactgagtctacttcaggagacagaaggcccatgctgatgggggaggaggagggatgtgggcattttggacaccaggggaaatggaaatgctgctttcaaaacttagtttcctttccatttcttcctagtctggcctttgacacaaatctggtagaaagaagcctgataaattgagggcacttgtaccctccctgtgcccccagaaggttcttggagagaagtgcaagaatttgtgaacacggcggtggagggcgggtggatggccatgggctgagcctccgtatcaggcctgctcaccttgctgggagctttattctgatctcattttgaatgttccagagggagcatcataagagcccagagctccgatttccaaagagtgatattgacatttatggagattggtgttgtaacatattttgataaatactaacttattttgttggggttttggttgtctcttgtcttaggacctggtagttatttgcttgatttttttttccgttattttctacataggcaaagagaattcgagggatagacagtctccaagaaaagtgaagtggtgggagagaattgcttttttcttttttttcttttctctagtttttctttctggctgagatttccgtgcaagacagcacccaatagactatttagagttgacatttgacattttaatgggcgccatggctcattttgtagattgagaaggtgcgtctcccctgctccaagtctcatcatgacagcgtgctgacagctgggagtctgtggccttcctcacgcagaggccttaaagctggacacagaagcacgcctaggctgggcagggatgggacccatgccccctccttagaggacgggcttcctggttaggaaaggacacgtgggggtgccttgcataatagttcactggtcaccgtgcttttatgagtagtgtttttgtgcacttgccaggggttttctctctgtgtgagaggggagtgatttaagcaatggtgtctggagtaagccttacaattttaatagactttttcttatcatatccctcatttctttccctgaaataaaaatacacacaagcaaaaaaaaaatgatagtttcacatctcttagttcccttgcccaaacaagaatattcttagttccactggccaggattttcctacatagtcagaacttacacattactagaggcacacccaccaaggagtattgtgtctacttttatctgtgcaccagccacaaatacccacattggaaagacccatttgtgatgggtaaacatcccttcctgtctcccacaacccctgtgactgccctgcatgtgttcatgacctccgaaggcccaaattcatgaagcagcaaacccagcagatctccacccccctgcctcaggacctctgctgaagagggggatgaagtgggtctccagggaggcagtgggggccttgttggcagctggctcgggagccggcttacaggagggcagctctgcagttgggaggggcaccgtccggaggagaccaggcctctacacaccccccactctacttatcatccctgctcacacacccttgtccaaggctttatgcatcggatttatttttccaaatcaagaggacagtgatagatgcattttccccaggctgtctcagaaaggtcgctaaatgtatactgttgtcagaattgctgagatctccccccacttttggtttttgcagcagtaaaaactctttccactgtgacttattttctctctcaggcagccagccacctggtcccttgtgctgactctagcacagtggccaggatccaatacgagtccaggggtgaccgcaggatggtgggggcagcgggcttctccacctaccccagccaccaaggccctgacgcactgcctcctgcaccttcagcacatccctgtgcacagctggaagggtgcatggcccgctcacctttgttcagatgggtggaaacgctgatgataccagctcctccctgccgtgcccctgccacggagcaggcattgtgaactggctggtgtttgcagtcccacgtggcatggcctccagcccaacccacagtggagactggagacagggcaatgagtctggtggggggcacgtggacatgccccataggggccccacccagacttaacaggcaaggtcctgggcattgcgcgacgcaggactcaatgctaaagcaagcctgcctggctctgtgccagggcccctcttctgattcacacatcccatttttacacagacccttccttcttaataaaggctgacagttctgttggcagccaagaacccacaccatgaagacagggagtgaggggcctttgtgcccaactccagcacagctgcgttctggggtgtgtgagaggcatgttcgtgtctgtgcgctggtggtctcgtgagacagttccgaggacggggaaattgcagggtggtgggggcgtgaggcttatatgtggaactgatgcagagttcgcctgcagacggatctggatatacactatgtataattgttacgtgtaatttaaaatatatctgtttgccatcgtcatgagaagattatatgtaaggctctgaagggagagggagatgtacattctgccaggctcctggggaccttatccgagtcatgaaattgattactgttgatccagtggtgcaagaagctacactccatgtgtcatcacgcttatgactcctaatgtatttttaaggcaaaaaatgtcagccgactccatcttcacccctcgattcctcgagtccagcctttctgtgccagtgcttcactgagccacaacgctctcgccatcgggacccggctgggcctggagtctcggggcacagttgccatggagccctcctgggtcattctacaaatgtgctgagtgccagctgaaaaccccacaggagatggagtaccttggccaagcttaaagagaagattttctcagggtatttattagtgtgtccagcagggtcaggaagcaggatggaaagatgcactcagactgttaatttattaacaaggcaaatgattttgtgtttcttgatgacagactattaagtttgggacttattttcccatttgagaagttataatatatatttaagatgataagtttcctgcttaagttgtgcctttcagcttcaatgagtttaaggagcactaagggtaatgataccaatgagggttggtttattatcaaacctgaatagctgtggtttctccagtaaatattttcttctactgaacatggagccattattaagagttgtgtgttttttattatgtacatttgtatatttttttgcttgtttgatgttctatttttctaatagttttcttttagtttcttaaagttgtgatactagatttagattctgatgctaactgcaaatcaggttggtctctgctgggtctctcctgcttttattttactttaaggacaagtgtagttgtcgtccaccacctttcaaaaaatgtgaaactgccctgcctcccctttttgctgacaacactgtgtacattgaccacttcctaccatactttatgttgtaaaatcaaactcttttgtggtacattatctcatgcttctgcaaattcgaataaattctatggcttccatgtg

SEQ ID NO: 7062 - protein, 629 aa, Homo sapiens; identical to SEQ ID NO: 962

SEQ ID NO: 7063 - DNA, 6871 bp, Homo sapiens
gcggccgcgggctcccgctaaccgcagcctccactcctctccccgcgcgccgcgcccccgccccgccccgccccgcccggtctcgccggccgagcgtccgttggtccttgagcgcgtccgacagtctgtctgttcgcgatcctgccggagccccgccgccgccggcttggattctgaaaccttccttgtatccctcctgagacatctttgctgcaagatcgaggctgtcctctggtgagaaggtggtgaggcttcccgtcatattccagctctgaacagcaacatggggtgcaaagtcctgctcaacattgggcagcagatgctgcggcggaaggtggtggactgtagccgggaggagacgcggctgtctcgctgcctgaacacttttgatctggtggccctcggggtgggcagcacactgggtgctggtgtctacgtcctggctggagctgtggcccgtgagaatgcaggccctgccattgtcatctccttcctgatcgctgcgctggcctcagtgctggctggcctgtgctatggcgagtttggtgctcgggtccccaagacgggctcagcttacctctacagctatgtcaccgttggagagctctgggccttcatcaccggctggaacttaatcctctcctacatcatcggtacttcaagcgtagcgagggcctggagcgccaccttcgacgagctgataggcagacccatcggggagttctcacggacacacatgactctgaacgcccccggcgtgctggctgaaaaccccgacatattcgcagtgatcataattctcatcttgacaggacttttaactcttggtgtgaaagagtcggccatggtcaacaaaatattcacttgtattaacgtcctggtcctgggcttcataatggtgtcaggatttgtgaaaggatcggttaaaaactggcagctcacggaggaggattttgggaacacatcaggccgtctctgtttgaacaatgacacaaaagaagggaagcccggtgttggtggattcatgcccttcgggttctctggtgtcctgtcgggggcagcgacttgcttctatgccttcgtgggctttgactgcatcgccaccacaggtgaagaggtgaagaacccacagaaggccatccccgtggggatcgtggcgtccctcttgatctgcttcatcgcctactttggggtgtcggctgccctcacgctcatgatgccctacttctgcctggacaataacagccccctgcccgacgcctttaagcacgtgggctgggaaggtgccaagtacgcagtggccgtgggctccctctgcgctctttccgccagtcttctaggttccatgtttcccatgcctcgggttatctatgccatggctgaggatggactgctatttaaattcttagccaacgtcaatgataggaccaaaacaccaataatcgccacattagcctcgggtgccgttgctgctgtgatggccttcctctttgacctgaaggacttggtggacctcatgtccattggcactctcctggcttactcgttggtggctgcctgtgtgttggtcttacggtaccagccagagcagcctaacctggtataccagatggccagtacttccgacgagttagatccagcagaccaaaatgaattggcaagcaccaatgattcccagctgggctttttaccagaggcagagatgttctctttgaaaaccatactctcacccaaaaacatggagccttccaaaatctctgggctaattgtgaacatttcaaccagcctcatagctgttctcatcatcaccttctgcattgtgaccgtgcttggaagggaggctctcaccaaaggggcgctgtgggcagtctttctgctcgcagggtctgccctcctctgtgccgtggtcacgggcgtcatctggaggcagcccgagagcaagaccaagctctcatttaaggttcccttcctgccagtgctccccatcctgagcatcttcgtgaacgtctatctcatgatgcagctggaccagggcacctgggtccggtttgctgtgtggatgctgataggcttcatcatctactttggctatggcctgtggcacagcgaggaggcgtccctggatgccgaccaagcaaggactcctgacggcaacttggaccagtgcaagtgacgcacagccccgccccccggaggtggcagcagccccgagggacgcccccagaggaccgggaggcaccccaccctccccaccagtgcaacagaaaccacctgcgtccacaccctcactgcagccaaaggtgcaattacttgacctgcagccccagcccaccctcggctctgcagccggttctccgggccctggtcacctccagacagctgcctggccggggccactaggctgcggctggccactgtgtctcctcacttctctgaacaaagcagttcctcccctaccagctcagccccgagctgccgcagcctcaggcagaacggaggtcaccttctctccttatcttgggaaccaggccttcctcccggggactgttctgggattgaaattgtgcatactccaaactttcgcagccatcttcccgctcagccccagacacccagcaatcaagccagatgagtaccacaaaacagtgtgtccccagcagctccccaccccagagccaaatgacagtagtgcacttaaaaaggaaaatcaggcctgttgtccttctccggttgcattcagatgggtcattagggccggaccctgcctgccccttggcttctcagggctttgctctgacaccatgacagctgcccggggctgagggcagctggctccactcaaatgaggaagaagggatcactcccattagggcctgctttgcttatgcatgtgtgtgcacatgcatgtaaaccagggaccttcagctcacggcctccaggcctgggccagttcttgctgctcctgccgtctcccccgactggctgtgtcctgagtaactggaacatgagacagtatctgcaggactggccccatggtggccgagtcagaagtctgtttcctgtgagtcgccaccgttcactcagtcttgccctcccatgctttggagccagtctggtggctcctgtaaggttctcaaggctggtggcagctcagtctggggtcaggacatgtcggggtcatgcgtttctggccctgacataagctgtctggcctctctgtgacatgatgaaattgaaatcaatccacagtccatgaaattgtgacactccaccagattaagttagggcataacattaacttggaaatggccatgtcatcacccctgcggctgtcctatagctgagatgcgtgggtcgcaggggaggtgatttctaggcatattgctgtcccttttgtgtatctgtcatccggatgcttcggaccccacgcctctgcaagtgggagagacccgagcatcctccccacccccatagctccagtgcacgccacccccgtcttgcctgggtcggggcctgcggccagcaccatttcacacacactccttgtagatgggagccagaggaaacctgaacgtgggtggagcgttccactgagtctacttcaggagacagaaggcccatgctgatgggggaggaggagggatgtgggcattttggacaccaggggaaatggaaatgctgctttcaaaacttagtttcctttccatttcttcctagtctggcctttgacacaaatctggtagaaagaagcctgataaattgagggcacttgtaccctccctgtgcccccagaaggttcttggagagaagtgcaagaatttgtgaacacggcggtggagggcgggtggatggccatgggctgagcctccgtatcaggcctgctcaccttgctgggagctttattctgatctcattttgaatgttccagagggagcatcataagagcccagagctccgatttccaaagagtgatattgacatttatggagattggtgttgtaacatattttgataaatactaacttattttgttggggttttggttgtctcttgtcttaggacctggtagttatttgcttgatttttttttccgttattttctacataggcaaagagaattcgagggatagacagtctccaagaaaagtgaagtggtgggagagaattgcttttttcttttttttcttttctctagtttttctttctggctgagatttccgtgcaagacagcacccaatagactatttagagttgacatttgacattttaatgggcgccatggctcattttgtagattgagaaggtgcgtctcccctgctccaagtctcatcatgacagcgtgctgacagctgggagtctgtggccttcctcacgcagaggccttaaagctggacacagaagcacgcctaggctgggcagggatgggacccatgccccctccttagaggacgggcttcctggttaggaaaggacacgtgggggtgccttgcataatagttcactggtcaccgtgcttttatgagtagtgtttttgtgcacttgccaggggttttctctctgtgtgagaggggagtgatttaagcaatggtgtctggagtaagccttacaattttaatagactttttcttatcatatccctcatttctttccctgaaataaaaatacacacaagcaaaaaaaaaatgatagtttcacatctcttagttcccttgcccaaacaagaatattcttagttccactggccaggattttcctacatagtcagaacttacacattactagaggcacacccaccaaggagtattgtgtctacttttatctgtgcaccagccacaaatacccacattggaaagacccatttgtgatgggtaaacatcccttcctgtctcccacaacccctgtgactgccctgcatgtgttcatgacctccgaaggcccaaattcatgaagcagcaaacccagcagatctccacccccctgcctcaggacctctgctgaagagggggatgaagtgggtctccagggaggcagtgggggccttgttggcagctggctcgggagccggcttacaggagggcagctctgcagttgggaggggcaccgtccggaggagaccaggcctctacacaccccccactctacttatcatccctgctcacacacccttgtccaaggctttatgcatcggatttatttttccaaatcaagaggacagtgatagatgcattttccccaggctgtctcagaaaggtcgctaaatgtatactgttgtcagaattgctgagatctccccccacttttggtttttgcagcagtaaaaactctttccactgtgacttattttctctctcaggcagccagccacctggtcccttgtgctgactctagcacagtggccaggatccaatacgagtccaggggtgaccgcaggatggtgggggcagcgggcttctccacctaccccagccaccaaggccctgacgcactgcctcctgcaccttcagcacatccctgtgcacagctggaagggtgcatggcccgctcacctttgttcagatgggtggaaacgctgatgataccagctcctccctgccgtgcccctgccacggagcaggcattgtgaactggctggtgtttgcagtcccacgtggcatggcctccagcccaacccacagtggagactggagacagggcaatgagtctggtggggggcacgtggacatgccccataggggccccacccagacttaacaggcaaggtcctgggcattgcgcgacgcaggactcaatgctaaagcaagcctgcctggctctgtgccagggcccctcttctgattcacacatcccatttttacacagacccttccttcttaataaaggctgacagttctgttggcagccaagaacccacaccatgaagacagggagtgaggggcctttgtgcccaactccagcacagctgcgttctggggtgtgtgagaggcatgttcgtgtctgtgcgctggtggtctcgtgagacagttccgaggacggggaaattgcagggtggtgggggcgtgaggcttatatgtggaactgatgcagagttcgcctgcagacggatctggatatacactatgtataattgttacgtgtaatttaaaatatatctgtttgccatcgtcatgagaagattatatgtaaggctctgaagggagagggagatgtacattctgccaggctcctggggaccttatccgagtcatgaaattgattactgttgatccagtggtgcaagaagctacactccatgtgtcatcacgcttatgactcctaatgtatttttaaggcaaaaaatgtcagccgactccatcttcacccctcgattcctcgagtccagcctttctgtgccagtgcttcactgagccacaacgctctcgccatcgggacccggctgggcctggagtctcggggcacagttgccatggagccctcctgggtcattctacaaatgtgctgagtgccagctgaaaaccccacaggagatggagtaccttggccaagcttaaagagaagattttctcagggtatttattagtgtgtccagcagggtcaggaagcaggatggaaagatgcactcagactgttaatttattaacaaggcaaatgattttgtgtttcttgatgacagactattaagtttgggacttattttcccatttgagaagttataatatatatttaagatgataagtttcctgcttaagttgtgcctttcagcttcaatgagtttaaggagcactaagggtaatgataccaatgagggttggtttattatcaaacctgaatagctgtggtttctccagtaaatattttcttctactgaacatgg

SEQ ID NO: 7064 - protein, 629 aa, Homo sapiens; identical to SEQ ID NO: 962

SEQ ID NO: 7065 - DNA, 4673 bp, Homo sapiens
gcggccgcgggctcccgctaaccgcagcctccactcctctccccgcgcgccgcgcccccgccccgccccgccccgcccggtctcgccggccgagcgtccgttggtccttgagcgcgtccgacagtctgtctgttcgcgatcctgccggagccccgccgccgccggcttggattctgaaaccttccttgtatccctcctgagacatctttgctgcaagatcgaggctgtcctctggtgagaaggtggtgaggcttcccgtcatattccagctctgaacagcaacatggggtgcaaagtcctgctcaacattgggcagcagatgctgcggcggaaggtggtggactgtagccgggaggagacgcggctgtctcgctgcctgaacacttttgatctggtggccctcggggtgggcagcacactgggtgctggtgtctacgtcctggctggagctgtggcccgtgagaatgcaggccctgccattgtcatctccttcctgatcgctgcgctggcctcagtgctggctggcctgtgctatggcgagtttggtgctcgggtccccaagacgggctcagcttacctctacagctatgtcaccgttggagagctctgggccttcatcaccggctggaacttaatcctctcctacatcatcggtacttcaagcgtagcgagggcctggagcgccaccttcgacgagctgataggcagacccatcggggagttctcacggacacacatgactctgaacgcccccggcgtgctggctgaaaaccccgacatattcgcagtgatcataattctcatcttgacaggacttttaactcttggtgtgaaagagtcggccatggtcaacaaaatattcacttgtattaacgtcctggtcctgggcttcataatggtgtcaggatttgtgaaaggatcggttaaaaactggcagctcacggaggaggattttgggaacacatcaggccgtctctgtttgaacaatgacacaaaagaagggaagcccggtgttggtggattcatgcccttcgggttctctggtgtcctgtcgggggcagcgacttgcttctatgccttcgtgggctttgactgcatcgccaccacaggtgaagaggtgaagaacccacagaaggccatccccgtggggatcgtggcgtccctcttgatctgcttcatcgcctactttggggtgtcggctgccctcacgctcatgatgccctacttctgcctggacaataacagccccctgcccgacgcctttaagcacgtgggctgggaaggtgccaagtacgcagtggccgtgggctccctctgcgctctttccgccagtcttctaggttccatgtttcccatgcctcgggttatctatgccatggctgaggatggactgctatttaaattcttagccaacgtcaatgataggaccaaaacaccaataatcgccacattagcctcgggtgccgttgctgctgtgatggccttcctctttgacctgaaggacttggtggacctcatgtccattggcactctcctggcttactcgttggtggctgcctgtgtgttggtcttacggtaccagccagagcagcctaacctggtataccagatggccagtacttccgacgagttagatccagcagaccaaaatgaattggcaagcaccaatgattcccagctgggctttttaccagaggcagagatgttctctttgaaaaccatactctcacccaaaaacatggagccttccaaaatctctgggctaattgtgaacatttcaaccagcctcatagctgttctcatcatcaccttctgcattgtgaccgtgcttggaagggaggctctcaccaaaggggcgctgtgggcagtctttctgctcgcagggtctgccctcctctgtgccgtggtcacgggcgtcatctggaggcagcccgagagcaagaccaagctctcatttaaggttcccttcctgccagtgctccccatcctgagcatcttcgtgaacgtctatctcatgatgcagctggaccagggcacctgggtccggtttgctgtgtggatgctgataggcttcatcatctactttggctatggcctgtggcacagcgaggaggcgtccctggatgccgaccaagcaaggactcctgacggcaacttggaccagtgcaagtgacgcacagccccgccccccggaggtggcagcagccccgagggacgcccccagaggaccgggaggcaccccaccctccccaccagtgcaacagaaaccacctgcgtccacaccctcactgcagccaaaggtgcaattacttgacctgcagccccagcccaccctcggctctgcagccggttctccgggccctggtcacctccagacagctgcctggccggggccactaggctgcggctggccactgtgtctcctcacttctctgaacaaagcagttcctcccctaccagctcagccccgagctgccgcagcctcaggcagaacggaggtcaccttctctccttatcttgggaaccaggccttcctcccggggactgttctgggattgaaattgtgcatactccaaactttcgcagccatcttcccgctcagccccagacacccagcaatcaagccagatgagtaccacaaaacagtgtgtccccagcagctccccaccccagagccaaatgacagtagtgcacttaaaaaggaaaatcaggcctgttgtccttctccggttgcattcagatgggtcattagggccggaccctgcctgccccttggcttctcagggctttgctctgacaccatgacagctgcccggggctgagggcagctggctccactcaaatgaggaagaagggatcactcccattagggcctgctttgcttatgcatgtgtgtgcacatgcatgtaaaccagggaccttcagctcacggcctccaggcctgggccagttcttgctgctcctgccgtctcccccgactggctgtgtcctgagtaactggaacatgagacagtatctgcaggactggccccatggtggccgagtcagaagtctgtttcctgtgagtcgccaccgttcactcagtcttgccctcccatgctttggagccagtctggtggctcctgtaaggttctcaaggctggtggcagctcagtctggggtcaggacatgtcggggtcatgcgtttctggccctgacataagctgtctggcctctctgtgacatgatgaaattgaaatcaatccacagtccatgaaattgtgacactccaccagattaagttagggcataacattaacttggaaatggccatgtcatcacccctgcggctgtcctatagctgagatgcgtgggtcgcaggggaggtgatttctaggcatattgctgtcccttttgtgtatctgtcatccggatgcttcggaccccacgcctctgcaagtgggagagacccgagcatcctccccacccccatagctccagtgcacgccacccccgtcttgcctgggtcggggcctgcggccagcaccatttcacacacactccttgtagatgggagccagaggaaacctgaacgtgggtggagcgttccactgagtctacttcaggagacagaaggcccatgctgatgggggaggaggagggatgtgggcattttggacaccaggggaaatggaaatgctgctttcaaaacttagtttcctttccatttcttcctagtctggcctttgacacaaatctggtagaaagaagcctgataaattgagggcacttgtaccctccctgtgcccccagaaggttcttggagagaagtgcaagaatttgtgaacacggcggtggagggcgggtggatggccatgggctgagcctccgtatcaggcctgctcaccttgctgggagctttattctgatctcattttgaatgttccagagggagcatcataagagcccagagctccgatttccaaagagtgatattgacatttatggagattggtgttgtaacatattttgataaatactaacttattttgttggggttttggttgtctcttgtcttaggacctggtagttatttgcttgatttttttttccgttattttctacataggcaaagagaattcgagggatagacagtctccaagaaaagtgaagtggtgggagagaattgcttttttcttttttttcttttctctagtttttctttctggctgagatttccgtgcaagacagcacccaatagactatttagagttgacatttgacattttaatgggcgccatggctcattttgtagattgagaaggtgcgtctcccctgctccaagtctcatcatgacagcgtgctgacagctgggagtctgtggccttcctcacgcagaggccttaaagctggacacagaagcacgcctaggctgggcagggatgggacccatgccccctccttagaggacgggcttcctggttaggaaaggacacgtgggggtgccttgcataatagttcactggtcaccgtgcttttatgagtagtgtttttgtgcacttgccaggggttttctctctgtgtgagaggggagtgatttaagcaatggtgtctggagtaagccttacaattttaatagactttttcttatcatatccctcatttctttccctgaaataaaaatacacacaagc

SEQ ID NO: 7066 - protein, 629 aa, Homo sapiens; identical to SEQ ID NO: 962

SEQ ID NO: 7067 - DNA, 4039 bp, Homo sapiens
gcggccgcgggctcccgctaaccgcagcctccactcctctccccgcgcgccgcgcccccgccccgccccgccccgcccggtctcgccggccgagcgtccgttggtccttgagcgcgtccgacagtctgtctgttcgcgatcctgccggagccccgccgccgccggcttggattctgaaaccttccttgtatccctcctgagacatctttgctgcaagatcgaggctgtcctctggtgagaaggtggtgaggcttcccgtcatattccagctctgaacagcaacatggggtgcaaagtcctgctcaacattgggcagcagatgctgcggcggaaggtggtggactgtagccgggaggagacgcggctgtctcgctgcctgaacacttttgatctggtggccctcggggtgggcagcacactgggtgctggtgtctacgtcctggctggagctgtggcccgtgagaatgcaggccctgccattgtcatctccttcctgatcgctgcgctggcctcagtgctggctggcctgtgctatggcgagtttggtgctcgggtccccaagacgggctcagcttacctctacagctatgtcaccgttggagagctctgggccttcatcaccggctggaacttaatcctctcctacatcatcggtacttcaagcgtagcgagggcctggagcgccaccttcgacgagctgataggcagacccatcggggagttctcacggacacacatgactctgaacgcccccggcgtgctggctgaaaaccccgacatattcgcagtgatcataattctcatcttgacaggacttttaactcttggtgtgaaagagtcggccatggtcaacaaaatattcacttgtattaacgtcctggtcctgggcttcataatggtgtcaggatttgtgaaaggatcggttaaaaactggcagctcacggaggaggattttgggaacacatcaggccgtctctgtttgaacaatgacacaaaagaagggaagcccggtgttggtggattcatgcccttcgggttctctggtgtcctgtcgggggcagcgacttgcttctatgccttcgtgggctttgactgcatcgccaccacaggtgaagaggtgaagaacccacagaaggccatccccgtggggatcgtggcgtccctcttgatctgcttcatcgcctactttggggtgtcggctgccctcacgctcatgatgccctacttctgcctggacaataacagccccctgcccgacgcctttaagcacgtgggctgggaaggtgccaagtacgcagtggccgtgggctccctctgcgctctttccgccagtcttctaggttccatgtttcccatgcctcgggttatctatgccatggctgaggatggactgctatttaaattcttagccaacgtcaatgataggaccaaaacaccaataatcgccacattagcctcgggtgccgttgctgctgtgatggccttcctctttgacctgaaggacttggtggacctcatgtccattggcactctcctggcttactcgttggtggctgcctgtgtgttggtcttacggtaccagccagagcagcctaacctggtataccagatggccagtacttccgacgagttagatccagcagaccaaaatgaattggcaagcaccaatgattcccagctgggctttttaccagaggcagagatgttctctttgaaaaccatactctcacccaaaaacatggagccttccaaaatctctgggctaattgtgaacatttcaaccagcctcatagctgttctcatcatcaccttctgcattgtgaccgtgcttggaagggaggctctcaccaaaggggcgctgtgggcagtctttctgctcgcagggtctgccctcctctgtgccgtggtcacgggcgtcatctggaggcagcccgagagcaagaccaagctctcatttaaggttcccttcctgccagtgctccccatcctgagcatcttcgtgaacgtctatctcatgatgcagctggaccagggcacctgggtccggtttgctgtgtggatgctgataggcttcatcatctactttggctatggcctgtggcacagcgaggaggcgtccctggatgccgaccaagcaaggactcctgacggcaacttggaccagtgcaagtgacgcacagccccgccccccggaggtggcagcagccccgagggacgcccccagaggaccgggaggcaccccaccctccccaccagtgcaacagaaaccacctgcgtccacaccctcactgcagccaaaggtgcaattacttgacctgcagccccagcccaccctcggctctgcagccggttctccgggccctggtcacctccagacagctgcctggccggggccactaggctgcggctggccactgtgtctcctcacttctctgaacaaagcagttcctcccctaccagctcagccccgagctgccgcagcctcaggcagaacggaggtcaccttctctccttatcttgggaaccaggccttcctcccggggactgttctgggattgaaattgtgcatactccaaactttcgcagccatcttcccgctcagccccagacacccagcaatcaagccagatgagtaccacaaaacagtgtgtccccagcagctccccaccccagagccaaatgacagtagtgcacttaaaaaggaaaatcaggcctgttgtccttctccggttgcattcagatgggtcattagggccggaccctgcctgccccttggcttctcagggctttgctctgacaccatgacagctgcccggggctgagggcagctggctccactcaaatgaggaagaagggatcactcccattagggcctgctttgcttatgcatgtgtgtgcacatgcatgtaaaccagggaccttcagctcacggcctccaggcctgggccagttcttgctgctcctgccgtctcccccgactggctgtgtcctgagtaactggaacatgagacagtatctgcaggactggccccatggtggccgagtcagaagtctgtttcctgtgagtcgccaccgttcactcagtcttgccctcccatgctttggagccagtctggtggctcctgtaaggttctcaaggctggtggcagctcagtctggggtcaggacatgtcggggtcatgcgtttctggccctgacataagctgtctggcctctctgtgacatgatgaaattgaaatcaatccacagtccatgaaattgtgacactccaccagattaagttagggcataacattaacttggaaatggccatgtcatcacccctgcggctgtcctatagctgagatgcgtgggtcgcaggggaggtgatttctaggcatattgctgtcccttttgtgtatctgtcatccggatgcttcggaccccacgcctctgcaagtgggagagacccgagcatcctccccacccccatagctccagtgcacgccacccccgtcttgcctgggtcggggcctgcggccagcaccatttcacacacactccttgtagatgggagccagaggaaacctgaacgtgggtggagcgttccactgagtctacttcaggagacagaaggcccatgctgatgggggaggaggagggatgtgggcattttggacaccaggggaaatggaaatgctgctttcaaaacttagtttcctttccatttcttcctagtctggcctttgacacaaatctggtagaaagaagcctgataaattgagggcacttgtaccctccctgtgcccccagaaggttcttggagagaagtgcaagaatttgtgaacacggcggtggagggcgggtggatggccatgggctgagcctccgtatcaggcctgctcaccttgctgggagctttattctgatctcattttgaatgttccagagggagcatcataagagcccagagctccgatttccaaagagtgatattgacatttatggagattggtgttgtaacatattttgataaatactaacttattttgttggggtt

SEQ ID NO: 7068 - protein, 629 aa, Homo sapiens; identical to SEQ ID NO: 962

SEQ ID NO: 7069 - DNA, 2147 bp, Homo sapiens
caggctgctggcctccttccccttcacctagctttactggctcctctcgccaaatctggggggtctcttcagcctctgtctccttgctgcccatggcctccctttgctcccctgccgccttctagtgggccgcctggtggtggacttgtcctgtgggatggagaccctccatacatggggttcaaaggtcctggggtattcctggatcttcaggacatctgcctaccctcaggtttcccaggcctcgggtggggaggcatcagatccctggccaacctgctatccaccccagggtttagacctctcttcccgtgagggaacagagtagtagcttcatttgtggcagattatctgccttgtgataaactttagtggcctccctttctgttttgccataatctgcctcctcccccactcccatacccatctacaaagcagccttgaaaataaccacccctgtggttcagtgtgggtcatgatctgtcaatccaggcttagtacatttccaaatggaattaccagaaggatgggcatcaaactgggaaaatgatttggtggcttgctagccgtgttcctttttctcccaaggcattcgttcagatgtgcagtgttggcagacccaggggatgccatttacctggcccactggtcgagatttggtcatcccaggaacttgggcttcagaaaagatgtttctgggctttggaccagattctggctggtctgtggtttgcccctcctgccacacccagtggctttcattgggcttttttcctctagttattgtcaggaacagtggggaatggcaggtattgcatttggtgaacacactggataactggaatcagagccgtgtgactgagggaagaggccttcacagcttcaatgcagaatgggatgattatctgccctgaaacgaaggatgcttctttgaggggagttgggaccaatactgggaacagcaccgctcctggcttctctggctttgcttctctctgaagtaatttagacttcgtgaaccttacatactggctccatctgtatattgggagagcctgtccctctcagcctcacagtagtgaagttaggaagcatggagtccacagtgttctttgaaagaatcaaggcaccaagtccatgcatttacatttctctcttgagatcagtccttttgttagcagcctgcaattctgaccacggcaaccaaaaatttctgaccgtggcaaccaaaaatcaagcgcgaggaaacctgggggtttatttggaggtgggagaggatgtcccttcttctggtaggactatgtctggctacattgtctttccatttttttctgattgtccccttgcccccctcccttttctgggggcacagagggcatggcaattttgtttcctagctttccatattcctactgcagtgctttcttcagaatacttgttcagatcggattcttggctgtgagggcaaccagctgctttcctgtttctttaaaagtggatcccacactgccgtgtcctgcacagtgagttctgcattgtagaaaccatctagcagtggtgactcagggagtggcctctgctcggtatggggcctctgcaacatgaggttatggggcttctacgctgtggggtcaaaggagacatcatgatccctactggcagaaagagcagagccccagagtgggttccacttacggggtcagtgtcttttctgagatattcctcagaaccacatttaaattctttttcatattgtttgcataataattgccttctagtgcctactttataggactgagaggatttaaatgagataatccatgttatggatttaacacagcctctggcacaagtctaaatgttgcatgtaagtgttaactattatactggaaagaaggctcagttccttgatttaggtgtgggagaaaaatatatatatattttgagataggccctggccaacatggtgaaactcatgtctacgaaaaatacaaaagttagcctggtgttggtggcgcatgcctatagttgcagctactcgggaggctgagacacaggaatcacttgaacccgggaggcggaggttgcagggagccgagatcacaccactgcactccagcctgggtaacagagtgagatactgtctc

SEQ ID NO: 7070 - protein, 122 aa, Homo sapiens
MESTVFFERIKAPSPCIYISLLRSVLLLAACNSDHGNQKFLTVATKNQARGNLGVYLEVGEDVPSSGRTMSGYIVFPFFSDCPLAPLPFLGAQRAWQFCFLAFHIPTAVLSSEYLFRSDSWL

SEQ ID NO: 7071 - DNA, 439 bp, Homo sapiens
tgtagaccggagctcgagaactactttttaattagggcttgggattagccattgccatagaatggagtgaataacagagaagagaaactgtgactaatttaagagtgataatcatacaattgcaatttggagaagattgacctgaaagaactgcagaggaagcatgctctttgtgtaagaaatccttaaattccacacaaaatctatatagtcttcctggacatgatgcataaggaaatcctaagactgcatgccgagtttaaccaattaaactggaataaactggaatgaatttgcatttgggaagtaaaacactatccaaggggcataagaacagctgggctcctactgaaggagacacatatggtgttcattgtggggttttgcttcttattccctttgagtaagaataaaatgatcttattttttgctcttcaaa

SEQ ID NO: 7072 - protein, 39 aa, Homo sapiens
MNLHLGSKTLSKGHKNSWAPTEGDTYGVHCGVLLLIPFE

SEQ ID NO: 7073 - DNA, 4381 bp, Homo sapiens
gggaggacgaggacgggggcggcggctgctgcgagggggggcccgtgctctccccgtttcccttagtcgcactcaggcagccgccgccgccgccgctgccgccatgttggtttgagaggcgatgacaggaggcggccgcggcgtgtgggactgaaaagtgaaggaggaggaggagaaacaaagctctgagaggaaaccattcccgggctgaggagaaggaggacccggcctcttccggggaccagccgaagtcggcgtcgcccggagctcgcgaggccggggaggggaggggaagggaaggcggagaccggggaggcggcggcggggaaggcggaggcagaagaggagtggcgaggagccggagacgatgcgccccgaccccagctgctgtccggaggcgcccgcggcctgagcccagaggggctgtggagtgtcccggccggccccgagcacccccgcgctgtcggtcccccgctccggtctttcgctttggcttccaactagttaaatgcccttgagcgcgggtttccgcggcccggctcttcgcccccgcggcgcgagttgagccgtttccccgcgctgtccgcgcgggcgctccgacagcggctctgcagggtccgcggccagcgtccggccaccgctcggccgccactcaaggctcacgcgtcgatgtgtagctacatagttatctgtgtacatccacgctggggcatttttctcctgcttaatgaggacttgactcgggagcaagtgtgaatcattgccggggctgggaaaggaggaaggcgcatttaaccccctcccacccctctccatgtccgtgtgtcactcggctcggtccacctggcgcggccggtcctggggctgctgctgctgttgacgacgacgacgacgacgggggctgcctctgctgtcccgggagtttcctcctgctccggccacacagctcctggggattgttcctcttcgaaccagaacctcggcctgaccggcactttggctccaaaataactttatttttgggggagaaagcacatcacgaaccagtcaaaatcgtggtttatttctgtaacgtgaagacttctgctcttttttctttgtttgtttttttcgtaaacatctgggtgtatatcaaacggcaagatgtccagtaatgtcccggcggatatgataaatttgcgcctcattttggtaagcggaaaaacaaaagagttcctgttttctcctaacgattctgcttctgacattgcaaagcatgtatatgacaattggccaatggactgggaagaagagcaggtcagcagtccaaatattctacgacttatttatcaaggacgatttctacatggaaatgtcacattaggagcattaaaacttccttttggcaaaacaacagtgatgcatttggtggccagagagacattaccagagccaaactctcaaggtcagaggaatcgtgagaagactggagagagtaattgttgtgtaatcctgtaaacactgtctgcctagtgtgatgtgatatagtctttgtctttcatgctgctgggacagaaaagacccgacattgcttcagaaaccgttcagaacagtctgcctgtaaacacatggaactgaattaccacatgaacactgtcatcttttctcatgaaagtaaaaagaaccaagaacatttttcactctgattttttatttcttgtattttttgttgagctgttttaacacatattggtttttgaatgcagtcaatctccaggggaaaagttaacaagttatctttcgtagcagaaaccattttgctgccacaaaattttcatcatcagaactaataaatcaagtgttccaaatacaatttgcattaaaaagattggcattattttcctcatcagcagaatttataacagtgtgtggtatctagaaatacttatatatacaattccacactggaagacactcagcaattaatgaagttaattactgggccaacttgagaggaaaaaatggaaaagaaactaaaatgttgggtgaattctaccaaagtcagccgtggtggctgcactggcacagaatactaaactgagtgtgactattttcactgcaacaaatgaaaaaacaaaatgtgcctgtttaaagcactcagtagagggctgatgaaactaattttttttcctttaagacatgcactcttgagtcctacagtaactgagtgtttgtttagacagcacaagaaggggtgagagtgcgtctcctagccttaatgtgggagggtagtttcagtcactcatcggctttcattattgtgcagaaatattagaaaacctcattgatcaattttatgtatttgaatatcagcaaattgaaattttccataattatcattaatttgtaaccacatccagtgtcatgcttactccttagagttcagatgaattcttaaaattaaaaaaaaactccatagtactaattttgtttctttatatagtttgcgtttgatattagtgcttgcaattgtattaaagtcaaaagctgatttttatggcatacacaagaatgccactttttcttttatttcataccaataatttaaagattgatatgctaaaaacaatttgcacagcactaaagcatgagctactttcatctaaacctgtaaaaatatgaaagatttttatattttttcactgggaagaaattcttcctggatgaaattacaaatatgtgtagaatatatttaataaaagacttataaaatacctaactacaggacttaaaatatagattggcgcgtagtatacagaacaatattccatataaataagtttagcctttataaaaatgaagttgcaggctgacattacattctgtactaagtgtcaacagcccttacaaacattaaatgtaaatggtttcaaatggtcagcgttgtttaaatgtaatcatgttattttattcattgttaatgctttgatgaaaaggctttatatgcagtagatctacgaaaatattgttcatactgatcagaattaaatttgtatagagcagagttttaaaatgaatgtaaatagcactaaacgttttctttctgcaacctgtacttacagattcttcctgtaaactaaataaaaaaaaaatgatagtgcattttggtggtaattttaaaggtcttgattaggtcaataattgtttaagcaccgtctcattcatgttttctactttcatttcttaagcttttaaaattcatttaattaatattctgttgttgttttggggagtattcccaatgtatctttgatatttaacctggttaatttgtggacagtcacaacaatggatagaattatgtagtctccgttatcactaaaatgttatcttcaagagatgttaaatatttatatgctttgttgactagctgaaatgtgaattctgttagtgttgactaaagaatctggtagttgcttaattgggcaattaaacaatttatggctctattttgtaaaacaaactactggtaattatttttaatacctattttcattctgattactctttttttaagttaaagactatcagttaattaagattgagtttttatgatggttaaaaataattctctattggtttttcaatatatttttctgtgtgttctcagattatatatttccctcaatttagagtttgctaagtgaaataaactggttcactagtagagaaagaattacgtcgcttaatacctaatatcatagttgtacaatatgaaaaaaaagaataaaaagtagcagtaaaattatatactgaaaacaccaaaaatttagatgccttaatagtatatacgtgaaatactcagctgtccctttaaaaataattccttggactgcctggtggttaaaatacgattcctcatatccaaggctacttttgaagatccctctgccaaaaatatagctcacttatctaaaggtgagagctgcatagatccagtaatgtacataaagcctgaatgatgagcctatgtccctgcctaacgctggtgtctcactcatctcttttacctaaattgtcctgaactttgttaagtgttctggacaaggccaagcttttctttattaaaacctcagcatgtctccctgatctgaactatttgctttctcttcaagataagttgtattttaccatggaaaaatacagtatctaacattaccattcacgttaaatgaagtttcctcataacatttatctttagttttatgaagtcatcgtgaccaatgttacagtaatttctgttagctgattgtggtaaacaatgtttaatgtgaaaagaaattaaaactttcttcatctgttgtagaatatttctcttctttaaaatggcttctattcataa

SEQ ID NO: 7074 - protein, 117 aa, Homo sapiens; identical to SEQ ID NO: 964

SEQ ID NO: 7075 - DNA, 3140 bp, Homo sapiens
gggaggacgaggacgggggcggcggctgctgcgagggggggcccgtgctctccccgtttcccttagtcgcactcaggcagccgccgccgccgccgctgccgccatgttggtttgagaggcgatgacaggaggcggccgcggcgtgtgggactgaaaagtgaaggaggaggaggagaaacaaagctctgagaggaaaccattcccgggctgaggagaaggaggacccggcctcttccggggaccagccgaagtcggcgtcgcccggagctcgcgaggccggggaggggaggggaagggaaggcggagaccggggaggcggcggcggggaaggcggaggcagaagaggagtggcgaggagccggagacgatgcgccccgaccccagctgctgtccggaggcgcccgcggcctgagcccagaggggctgtggagtgtcccggccggccccgagcacccccgcgctgtcggtcccccgctccggtctttcgctttggcttccaactagttaaatgcccttgagcgcgggtttccgcggcccggctcttcgcccccgcggcgcgagttgagccgtttccccgcgctgtccgcgcgggcgctccgacagcggctctgcagggtccgcggccagcgtccggccaccgctcggccgccactcaaggctcacgcgtcgatgtgtagctacatagttatctgtgtacatccacgctggggcatttttctcctgcttaatgaggacttgactcgggagcaagtgtgaatcattgccggggctgggaaaggaggaaggcgcatttaaccccctcccacccctctccatgtccgtgtgtcactcggctcggtccacctggcgcggccggtcctggggctgctgctgctgttgacgacgacgacgacgacgggggctgcctctgctgtcccgggagtttcctcctgctccggccacacagctcctggggattgttcctcttcgaaccagaacctcggcctgaccggcactttggctccaaaataactttatttttgggggagaaagcacatcacgaaccagtcaaaatcgtggtttatttctgtaacgtgaagacttctgctcttttttctttgtttgtttttttcgtaaacatctgggtgtatatcaaacggcaagatgtccagtaatgtcccggcggatatgataaatttgcgcctcattttggtaagcggaaaaacaaaagagttcctgttttctcctaacgattctgcttctgacattgcaaagcatgtatatgacaattggccaatggactgggaagaagagcaggtcagcagtccaaatattctacgacttatttatcaaggacgatttctacatggaaatgtcacattaggagcattaaaacttccttttggcaaaacaacagtgatgcatttggtggccagagagacattaccagagccaaactctcaaggtcagaggaatcgtgagaagactggagagagtaattgttgtgtaatcctgtaaacactgtctgcctagtgtgatgtgatatagtctttgtctttcatgctgctgggacagaaaagacccgacattgcttcagaaaccgttcagaacagtctgcctgtaaacacatggaactgaattaccacatgaacactgtcatcttttctcatgaaagtaaaaagaaccaagaacatttttcactctgattttttatttcttgtattttttgttgagctgttttaacacatattggtttttgaatgcagtcaatctccaggggaaaagttaacaagttatctttcgtagcagaaaccattttgctgccacaaaattttcatcatcagaactaataaatcaagtgttccaaatacaatttgcattaaaaagattggcattattttcctcatcagcagaatttataacagtgtgtggtatctagaaatacttatatatacaattccacactggaagacactcagcaattaatgaagttaattactgggccaacttgagaggaaaaaatggaaaagaaactaaaatgttgggtgaattctaccaaagtcagccgtggtggctgcactggcacagaatactaaactgagtgtgactattttcactgcaacaaatgaaaaaacaaaatgtgcctgtttaaagcactcagtagagggctgatgaaactaattttttttcctttaagacatgcactcttgagtcctacagtaactgagtgtttgtttagacagcacaagaaggggtgagagtgcgtctcctagccttaatgtgggagggtagtttcagtcactcatcggctttcattattgtgcagaaatattagaaaacctcattgatcaattttatgtatttgaatatcagcaaattgaaattttccataattatcattaatttgtaaccacatccagtgtcatgcttactccttagagttcagatgaattcttaaaattaaaaaaaaactccatagtactaattttgtttctttatatagtttgcgtttgatattagtgcttgcaattgtattaaagtcaaaagctgatttttatggcatacacaagaatgccactttttcttttatttcataccaataatttaaagattgatatgctaaaaacaatttgcacagcactaaagcatgagctactttcatctaaacctgtaaaaatatgaaagatttttatattttttcactgggaagaaattcttcctggatgaaattacaaatatgtgtagaatatatttaataaaagacttataaaatacctaactacaggacttaaaatatagattggcgcgtagtatacagaacaatattccatataaataagtttagcctttataaaaatgaagttgcaggctgacattacattctgtactaagtgtcaacagcccttacaaacattaaatgtaaatggtttcaaatggtcagcgttgtttaaatgtaatcatgttattttattcattgttaatgctttgatgaaaaggctttatatgcagtagatctacgaaaatattgttcatactgatcagaattaaatttgtatagagcagagttttaaaatgaatgtaaatagcactaaacgttttctttctgcaacctgtacttacagattcttcctgtaaactaaataaaaaaaaaatgatagtgc

SEQ ID NO: 7076 - protein, 117 aa, Homo sapiens; identical to SEQ ID NO: 964

SEQ ID NO: 7077 - DNA, 1183 bp, Homo sapiens
cattttggtaagcggaaaaacaaaagagttcctgttttctcctaacgattctgcttctgacattgcaaagcatgtatatgacaattggccaatgggtgagtgatatttttctcttgagtatgaataatgttgattcttatgccctaccttgtctcacaaacattttgaaactgttatataacatttaaaagaacaaccgaaaattgagagtataaggctcagatttagaggatcattgtacccttccttatcttgctcttcagcagtctcattcccaaatggtaaaggagcccagaatgcaatggctctgcttctgtcttagaaaaaaaaaattgcctccctcaagtgaattgttggtttattttcttcctttgaacttccccagtgtcatcttgatccttatgtcatgtatcatagtgatatgatttttttcagctgatttcacttaattttattagcagtagcaatttgaacttttaaaggacaagacttattttgacaaagaacatagtatatgtacaaaatgagtcaattagattagtgtttctcaaccttaaataatatacggagcttttctagaggaagataattcttgtagatctctagttgctgacttaaattatttttattataatgcgtattttaaaatgtagaaacttaaacccagttaaaactctttattcttcttaactcatatacacaatcataaaactaaaaaagattgattcagaaaatgcaaatataactctgaaaccaataatgttcaagttaacaacattaatgtgctagatgatgtatttttgccaaagccagctcactgcttacagcatgaatactgttgagtttgtcatgcctatgttcctacatagtgtttgatgaccaggttgtctgtagagtcaccataaaacctttatttatacagtataacaaattgttactcagttttctcataggtagaatgcatcatttacttgttaagtgaacccctgttctgatctcattagcctcctaacaattaaagaagtactgactgcttggcaccagtacagtcataaatttaatgcacacgtgagtactaaaaccccaaggctgcacttgggttataaagtcactatttaaatcatctagacaatctcctccagatttcattaaaatgaaaatacagattttccagattttcatt

SEQ ID NO: 7078 - protein, 48 aa, Homo sapiens
MVKEPRMQWLCFCLRKKKLPPSSELLVYFLPLNFPSVILILMSCIIVI

SEQ ID NO: 7079 - DNA, 1044 bp, Homo sapiens
tcccatgtgtcctaccttactccccctaaaaaatatatggtcatgcagttggggctaaaagagctattgggaggctgaggcaggagaatggattgagcttgggaggccgaggttgcagtgagccaagattgtaccactacactccagcctgggtgacagagcagagactctgtctcaaaaaaacatacatagtttattgttaattcgtctaggttttaataattttcataggaaaaaaacttgtatatagtttattttcttttaattatattttttaagaagtagaatatcaactaaattttttttctgtttagtgacgagacctgcagtgtcaacatttttattaatttttgggtaaaaatgtatattctataataatagtgataacttgcaaaagttcaattctgaacattgttggagtgattaaatttaaaagtgtaatgaattttggttttcctttgttcatttattatggcaaatatgtctgacacacacacacaccctttaaataataggaaataaaatcaaatatcaaattcccattctttttaaaaaagttttatagaatttaaataaaaaccacaatatggcattggtaataatttaggatgtgattgaaatgaaaagcctttgagtcttcttttttacttaaaaaatttttagatttatgttaaaagaatcattgtcttctttcagataaatttgcgcctcattttggtaagcggaaaaacaaaagagttcctgttttctcctaacgattctgcttctgacattgcaaagcatgtatatgacaattggccaatgggtgagtgatatttttctcttgagtatgaataatgttgattcttatgccctaccttgtctcacaaacattttgaaactgttatataacatttaaaagaacaaccgaaaattgagagtataaggctcagatttagaggatcattgtacccttccttatcttgctcttcagcagtctcattcccaaatggtaaaggagcccagaatgcaatggctctgcttctgtcttagaactgttttaac

SEQ ID NO: 7080 - protein, 38 aa, Homo sapiens
MYMTIGQWVSDIFLLSMNNVDSYALPCLTNILKLLYNI

SEQ ID NO: 7081 - DNA, 933 bp, Homo sapiens
ggcagccgccgccgccgccgctgccgccatgttggtttgagaggcgatgacaggaggcggccgcggcgtgtgggactgaaaagtgaaggaggaggaggagaaacaaagctctgagaggaaaccattcccgggctgaggagaaggaggacccggcctcttccggggaccagccgaagtcggcgtcgcccggagctcgcgaggccggggaggggaggggaagggaagtcggtcccccgctccggtctttcgctttggcttccaactagttaaatgcccttgagcgcgggtttccgcggcccggctcttcgcccccgcggcgcgagttgagccgtttccccgcgctgtccgcgcgggcgctccgacagcggctctgcagggtccgcggccagcgtccggccaccgctcggccgccactcaaggctcacgcgtcgatgtgtagctacatagttatctgtgtacatccacgctggggcatttttctcctgcttaatgaggacttgactcgggagcaagtgtgaatcattgccggggctgggaaaggaggaaggcgcatttaaccccctcccacccctctccatgtccgtgtgtcactcggctcggtccacctggcgcggccggtcctggggctgctgctgctgttgacgacgacgacgacgacgggggctgcctctgctgtcccgggagtttcctcctgctccggccacacagctcctggggattgttcctcttcgaaccagaacctcggcctgaccggcactttggctccaaaataactttatttttgggggagaaagcacatcacgaaccagtcaaaatcgtggtttatttctgtaacgtgaagacttctgctcttttttctttgtttgtttttttcgtaaacatctgggtgtatatcaaacggcaagatgtccagtaatgtcccggcggatatgg

SEQ ID NO: 7082 - protein, 59 aa, Homo sapiens
RRRRRNKALRGNHSRAEEKEDPASSGDQPKSASPGAREAGEGRGREVGPPLRSFALASN

SEQ ID NO: 7083 - DNA, 1090 bp, Homo sapiens
gtttagggcctccttcaggagacagatgactctgaccggggatcagggtcagggctggcatctctgctctggctaaaattcaaattttacatgtatctctatgaggtgggcattttgctgtcaaaggttttatggatggttctagatgtggaaacagattattaaaaggaaaagcaaagccttgcttggcagagcttacacttctcaagcattgacctgagccttaaattttgcaactgtaattttagaggatgcaggacacacatcctgttttggaggctgttttggaggagcaggaagacaaaaaaagagatgctgtggactcagttctcaaaggcaagtggtggcagaacaccaggaagaaatcagttagcggggaaaaaccacatggcttagagtctagtgaacaacagcttaaaggggaatacaggtagaaaacagaagacagttccaaaagggagacttaatttttatttccatgaaagctgagcatcagaagagacctattttttgggtcagagacgtttaactgggagctctgtcagacctgggactagaatcgagagcccagcagaaacactgctctggtattcaggaagaatagcttggcttggaatgggaagaagagtgggactcaagaatacagactttgcaggagtccagcagaaatcagttggtaaaaacagacctgactcgtgaggctggacagagtcctccacgccttgggatctgagtcactggaaccaaactagactctattttacttcctataaccacctgcctggacagattgcacccttgtcagttaccatcaggggagagttgttttcttcaccacggtcacaaagactggccttcatgtgtgtgctatcatggtgatgacttcccagggaggaaagtacagggaggatgagaaactttttggccaatgggagcaggaagaacttcaagctctccaggagataaaagcaaagtcacagggctctgtgctgctgaagcacacttctggatatacctgccacaagcagcaacgctaattaaattggcattccttatcaccactgcagtagctcctcaggaatatttatat

SEQ ID NO: 7084 - protein, 60 aa, Homo sapiens
MQDTHPVLEAVLEEQEDKKRDAVDSVLKGKWWQNTRKKSVSGEKPHGLESSEQQLKGEYR

SEQ ID NO: 7085 - DNA, 575 bp, Homo sapiens
tcttctctcttcctccttcggctcctgttggccggtgccttcctgaacctgaagaatatctttgctctttccaactcccacattcaaaacagagtcttacaactcagccacattttctgctgagccagccagtgggaacaaacaccaagagacctggagccacagaaacactcatacatgagccaagaagaaaaaaattgtgtggcagctgcccagctctgctctgcaaccatgcgcttcctgtttactgactaagacctgatgaacctgtatctactactgcccagggcacattaaagtcaccacaacccctgctagatgactattttgatatggaggggaaagaattgctcccctcagcccatggggataaatttaggaccatcactggccagccttatgtccttgcctgaggagttggaactgggaaccaaaagggaaagttcacctgacttggaaacgtgcacacaagcagtctctcaacactgtgacgtttatagtgaaggaagcatcaccgaagagagttgcgtttcattcggatggcctggccataataaactgtcctgaatggaaca

SEQ ID NO: 7086 - protein, 82 aa, Homo sapiens
MTILIWRGKNCSPQPMGINLGPSLASLMSLPEELELGTKRESSPDLETCTQAVSQHCDVYSEGSITEESCVSFGWPGHNKLS

SEQ ID NO: 7087 - DNA, 564 bp, Homo sapiens
agattggtggcttcctcctgagcacactgggatgtggcattacatcggggctgctgagtgcccttaccttcagctgcccagatgcagaggcaggtatttggctagaagttatcactgatacgtttccagaacacatggaggccaaggcagacaaaagtaaagatggaaaccagaccagtaaataagtcctttgatgaacttctgagtctctacagatgaaggcaaagctccctcacagttgcaggcaacgtctcatcttttgtcacttctggcatgacactgcacagccacagccagtacggtatctctgcctttgcccatgtcctgccttctttctccctggtcggtatctcctcacctcaaccagcttggccagctccttggtcattggggttgcacccacccaggcatgtgcctggctccgcacaacctcagaagctctcagtacagtgcaggaccagaggttgaaaccaatgaaaggttgttaaataaagagaaaatgtttaatgctgagaacaaagactaggaaagagatgtctaataagaaattttacagtgaaatac

SEQ ID NO: 7088 - protein, 90 aa, Homo sapiens
MKAKLPHSCRQRLIFCHFWHDTAQPQPVRYLCLCPCPAFFLPGRYLLTSTSLASSLVIGVAPTQACAWLRTTSEALSTVQDQRLKPMKGC

SEQ ID NO: 7089 - DNA, 8192 bp, Homo sapiens
tatttcagggacagacacaaggggaagcagcagccagagcacacccgggccgctcacgggaagccttgctgaagagagaggatccgcagaagctgggaaattcctcccgcagcctaggcggagactgagccgcggctcaggttgagacagtgggcaggggcagggggcggcgctcccggcccatcccttagccccgcggcggccgtgtgggccggaggctgcctgcaccgcgtcagggaggccggcctagaaaccctccctcccagaagaaagccgatcccagttcaggtggggtcttcctcggttgcgtacctggctggagccgagctggtgggcggccggcagccggcgtttctggtgatgacagccccgaaatgaaagcagcgcggccgccgcctccgagggctgcagggagatcagcgtccagcaaataagaagcaagtcctggacccggaggaggaggagcggccgagcatctctctctgctccgccgtgtcctttagatgagcactcccggccggagccggaggtggatccgcagagctgcctctgggcgcctgaccccgcgctgacatcacaacctgtgacaggcgcatcacgcccggtacctgctcccggccgctgcccgtcctcccagcctctttgtatgccgcagacatggccagccagcaggattcgggcttctttgagatcagtatcaaatatttactgaaatcctggagtaatacttctcccgttggcaacggttacatcaagcctccggttccacctgcttctggcacgcacagggagaaagggccgccaaccatgctacccatcaatgtggacccagacagtaaaccaggagaatatgtcctcaaaagtttatttgtcaacttcaccactcaggctgaacgcaagattcgtatcattatggcagagcccctggaaaagccattgacaaaatctctgcaacgtggagaagacccccaatttgatcaggtcatcagctcaatgagctccctttctgagtactgcctgccttccattctacgtacattatttgactggtataaaaggcaaaatggcattgaggatgaatcacatgaatacagaccaagaacaagcaataaatcaaaaagcgatgaacaacagcgagattatttaatggaaagacgggacctcgccattgattttattttttctttagtattaatagaagttttgaaacagattccacttcatcctgtaatagacagtttaatacatgatgttattaacttggctttcaagcactttaaatacaaagaagggtaccttggtcccaacactggcaatatgcatattgtggcagacctgtatgcagaagtcattggagtgttggcacaagccaaattccctgctgtaaagaagaaatttatggcggagctaaaagaattacggcacaaagagcagaacccatatgtggttcaaagcattatcagcttaataatgggcatgaaattctttcgaattaagatgtatccagtggaggattttgaggcctctcttcagtttatgcaggaatgtgcacattacttcctcgaggtcaaagacaaagatatcaagcatgccttggctgggctttttgttgaaatacttgttccagttgctgctgctgttaaaaatgaagtaaatgttccctgccttagaaattttgtggaaagcctgtatgacaccacgctggaactttcttctcgaaagaagcattccttggccttgtaccccctggtgacctgtttgctctgtgtcagtcagaagcagctgttcctgaacaggtggcacattttcctcaacaactgcttgtccaaccttaaaaacaaagatcccaagatggctcgagttgcactggaatctctctacagattactttgggtttacatgattcgaattaaatgtgaaagcaacacagctactcagagccgacttataaccatcatcacaacacttttccccaaagggtcccgcggtgtggtaccaagggacatgcctctgaacatctttgtgaaaatcatccagttcattgcccaggaacgtttagattttgcaatgaaagaaatcattttcgattttctttgtgtgggaaaaccagcaaaagcattcagtctcaacccagagagaatgaacattggtttacgggcattcttggtcatagctgatagcttgcagcagaaagatggggaacctcccatgccggttacaggagccgttcttccttcaggaaacacgttaagagtaaagaaaacatatttgagtaaaacactaactgaagaggaagccaaaatgataggcatgtccttatattactctcaagtacgaaaagctgtagacaacattttaaggcaccttgataaagaagtaggaaggtgtatgatgctgactaatgtacagatgttaaacaaagaaccggaagacatgatcacgggtgagagaaagccaaaaatagatcttttcaggacctgtgttgctgctattcctcgactgcttcctgatgggatgtcaaaacttgaacttattgacttactggctaggctctctattcatatggatgatgaattgcgacatattgcacaaaattctcttcagggtttacttgttgacttctcagattggagggaagatgtactatttggctttaccaacttcctgctccgggaagtaaatgatatgcatcacacactccttgattcgtccctgaagttgctgctgcagctgctcacccagtggaaactagtcatccagacacaaggaaaagtctatgaacaagccaacaaaatcagaaattcagagctcatcgcaaatggctccagtcacagaattcagtcggaacgaggtccccactgcagtgtactccacgctgtagaaggttttgctctggttttactctgcagtttccaggtggccacacgcaaactgtccgttttaatactcaaggaaattcgagcgttgtttattgccctggggcagcctgaggatgacgacaggccgatgattgatgtcatggatcagctaagttcttccattctagaaagttttattcatgtagcagtttcggattcagcaacattaccactcacccacaatgtggatctgcagtggttggtggaatggaacgcagtcctggtcaatagccattatgatgtgaaaagcccttcccatgtctggatatttgcacagtctgtcaaagacccctgggtcctctgcctcttcagcttcctccggcaggagaacttacccaagcactgccccacagccctcagctatgcctggccttatgccttcactcggctccagtcggtgatgcctctggtggacccaaatagcccaattaatgccaagaaaaccagcactgccggcagcggagacaactatgttactttgtggagaaattacctaattctttgttttggagttgcaaaacccagtattatgagcccaggacacttaagagcttccactccagaaataatggcgaccacacctgatggtacagtgagctacgataacaaggccataggcaccccatcggtgggagttctgttaaagcagttggtgcctttgatgagactagagagcattgagatcacagagtccttagttttaggatttggaagaacaaattcccttgttttcagagaattggtagaagaacttcatccattaatgaaagaagctctggaaagaagaccagagaacaagaaacgccgagaacggcgagacttgttaaggctacaactacttcgaatttttgaacttttggctgatgctggtgtaataagtgacagcacaaatggagccctagagcgggatactttagccctgggagctttgttcttagaatatgtggacttgacccgcatgctcctagaagctgaaaatgacaaagaagttgaaattcttaaagatatccgggcacattttagtgcaatggtggccaacttgattcagtgtgttccagttcaccaccgaagatttctcttcccccagcaaagtctgaggcaccaccttttcatcttattcagccagtgggcaggacccttcagcattatgttcactcctctggatcgttacagtgacagaaatcatcagattacaagatatcagtattgtgcattaaaagcaatgtcagcagtactgtgctgtggccctgtctttgacaatgtgggcctttccccagatggctacctatataaatggcttgacaacattctggcttgtcaagatttacgagttcatcaacttggctgcgaagttgttgtcttgctactggaacttaatcctgaccaaataaatctttttaactgggcaattgaccgatgctacacaggttcctaccaacttgcatctggctgcttcaaagccatagcaactgtgtgtggaagcaggaactatcccttcgacatagtgacattgttaaaccttgttctattcaaggcctctgacaccaacagagagatttatgaaatctccatgcagctcatgcagatccttgaagcaaagctttttgtatactcaaagaaagtcgctgagcaaagaccgggaagtattctctatggaacacacggcccgctgccacccctctacagcgtgtcacttgccctcttgtcatgtgagctggccaggatgtaccctgagctcacactccccctcttctcaggtaagccagcgattccccacaacacaccccaacgggcgccagatcatgcttacctacctgctgccctggctgcacaacatcgagctggtggacagcaggctcctcctcccggggtcgagccccagcagcccagaggacgaagtcaaggaccgggaaggtgacgtgactgcttctcacgggctgagaggaaatggctggggctctccagaagccacgtcactggtcctgaacaacctcatgtacatgacggccaagtatggagatgaagttcctgggccagaaatggaaaatgcttggaatgctttagccaacaatgagaaatggagcaacaacctgaggatcaccttgcagttcctgattagcctctgtggggtcagcagcgacacagttctcctaccctatattaaaaaagtggcaatatacttgtgccgtaacaacaccattcaaaccatggaagagcttctctttgagctgcagcagacagagcccgtgaaccccatcgtccagcattgtgacaacccgcccttctaccgcttcacggccagtagcaaggcttccgcagcagcctcaggaaccacctctagcagcaatacagtggttgctggccaggaaaatttcccagatgctgaggagaacaagatattgaaagaatctgatgaaaggtttagtaatgtcatcagagcccacactcgcctcgagtcaagatacagcaatagctctggaggatcctacgatgaagataaaaatgatccaatttctccctacacgggctggttgctgactattacagagaccaagcagccgcagcccttaccgatgccttgtactggaggatgctgggcccccctggttgactatctcccggagaccatcactccccgggggccactccacaggtgcaatattgctgtaatttttatgactgaaatggtggtggatcacagtgtacgagaagactgggcgcttcatctaccattattacttcatgctgtcttcttaggtttagaccactaccggcctgaagtctttgaacacagcaaaaaactgcttcttcacctcttgattgccctctcttgcaacagcaatttccattccattgcttccgtgctcctgcagacccgagagatgggtgaagctaagactctaaccgtgcagccagcctaccaacctgaatatctctatacaggtggctttgacttcctgagagaggaccagtcatccccggtgcctgactcagggcttagttcaagctccacctcctctagcatcagtctgggaggcagcagtggaaacctcccacagatgacccaggaggtagaagatgtggacacagctgctgaaacagatgagaaggcaaacaagctcattgagtttctcacgaccagggcatttggtccactttggtgccatgaagacatcacacctaaaaatcaaaattcaaagagtgctgaacagctcactaattttctacgtcacgttgtatctgtatttaaagattccaaatcaggcttccatctggagcaccagttgagtgaagttgcattgcagacagccctcgcaagctcttcaaggcactatgctggtcggtccttccagatattccgggccctcaagcaacctctgtcagcacatgccttatctgaccttctctcaagattggtggaggtgataggagaacatggagatgagattcagggttatgtaatggaagcgctcctaaccttggaggcggctgtggataacttgtctgactgcttgaagaacagtgacctcctaactgtattgtcccgctcttcctcaccagatttaagctccagcagtaaactaacagcaagcagaaagagcacaggacaactaaacatgaacccgggaaccaccagcggcaacaccgcaactgccgaacggagccggcatcaacgaagcttctctgtgcccaagaagtttggtgtcatcgaccgatcctctgacccacctcgaagtgccacactggacagaattcaggcttgtacccaacaaggcctctcctcaaaaaccagaagctcatcctccttgaaggacagtctcacggacccatcccacataaaccatcccaccaacctgctggccaccatattctgggtcacagtggccttgatggagtctgattttgagtttgaatacttaatggccttaaggctgttgagcagactactggcacatatgccactcgataaggctgagaaccgagaaaagcttgagaaactccaggcacagctgaagtgggccgacttctccgggctgcagcagctgctgctgaaaggattcacatccctcaccaccacagacctgaccctgcagctcttcagtctgctgacaccagtgtccaaaatatccatggtggatgcatcccacgctattgggtttccactgaatgtcttgtgtctcctgcctcagctgattcagcattttgaaaatcccaatcagttctgtaaggatatagccgaaaggattgctcaggtttgtttagaagagaagaaccccaaactttcaaatcttgcacatgtcatgactctttataaaacgcacagctacacgagggactgtgccacgtgggtcaatgtggtctgtcgataccttcatgaagcatatgctgacattaccttgaatatggttacctacctggcagagctgctggagaagggcctccctagtgtgcagcagcccctgctccaggtgatctacagtcttctcagctacatggacctttctgtcgttcctgtcaaacagttcaatgtggaagttctgaagacaattgaaaaatatgtgcaaagtgttcactggagagaagctctgaatatcttgaagctggtagtttctcggtcagccagccttgttttaccttcataccagcacagtgacctctcaaaaatagaaatacatcgagtgtggactagtgcttccaaggaattacctgggaaaaccctggacttccacttcgatatttcggagactccaatcatcgggaggcggtatgatgagctgcagaattcttctgggcgtgatgggaagcccagggccatggccgtcacccggagcacatcttccacttcctcaggctccaactccaacgtccttgttccagtgagctggaaaaggccccagtattctcagaagagaacaaaagagaagttggtacatgtcctttctctgtgtggccaagaagtaggattgagcaaaaatccatcagtgattttttcatcgtgtggggatctggatctgcttgagcaccagacaagcttggtatcttctgaggacggtgcccgagagcaggagaacatggatgacacaaacagcgagcagcagtttagagtcttcagagacttcgacttcctagatgtggagctggaggatggagagggtgagagtatggacaatttcaactggggagtgcgcagacgttctctggacagcctggataagtgtgatatgcagattctggaggagcgccaactgtcaggaagcactcctagcctgaata

SEQ ID NO: 7090 - protein, 1739 aa, Homo sapiens
MKSPCSSCRSLKQSFLYTQRKSLSKDREVFSMEHTARCHPSTACHLPSCHVSWPGCTLSSHSPSSQVSQRFPTTHPNGRQIMLTYLLPWLHNIELVDSRLLLPGSSPSSPEDEVKDREGDVTASHGLRGNGWGSPEATSLVLNNLMYMTAKYGDEVPGPEMENAWNALANNEKWSNNLRITLQFLISLCGVSSDTVLLPYIKKVAIYLCRNNTIQTMEELLFELQQTEPVNPIVQHCDNPPFYRFTASSKASAAASGTTSSSNTVVAGQENFPDAEENKILKESDERFSNVIRAHTRLESRYSNSSGGSYDEDKNDPISPYTGWLLTITETKQPQPLPMPCTGGCWAPLVDYLPETITPRGPLHRCNIAVIFMTEMVVDHSVREDWALHLPLLLHAVFLGLDHYRPEVFEHSKKLLLHLLIALSCNSNFHSIASVLLQTREMGEAKTLTVQPAYQPEYLYTGGFDFLREDQSSPVPDSGLSSSSTSSSISLGGSSGNLPQMTQEVEDVDTAAETDEKANKLIEFLTTRAFGPLWCHEDITPKNQNSKSAEQLTNFLRHVVSVFKDSKSGFHLEHQLSEVALQTALASSSRHYAGRSFQIFRALKQPLSAHALSDLLSRLVEVIGEHGDEIQGYVMEALLTLEAAVDNLSDCLKNSDLLTVLSRSSSPDLSSSSKLTASRKSTGQLNMNPGTTSGNTATAERSRHQRSFSVPKKFGVIDRSSDPPRSATLDRIQACTQQGLSSKTRSSSSLKDSLTDPSHINHPTNLLATIFWVTVALMESDFEFEYLMALRLLSRLLAHMPLDKAENREKLEKLQAQLKWADFSGLQQLLLKGFTSLTTTDLTLQLFSLLTPVSKISMVDASHAIGFPLNVLCLLPQLIQHFENPNQFCKDIAERIAQVCLEEKNPKLSNLAHVMTLYKTHSYTRDCATWVNVVCRYLHEAYADITLNMVTYLAELLEKGLPSVQQPLLQVIYSLLSYMDLSVVPVKQFNVEVLKTIEKYVQSVHWREALNILKLVVSRSASLVLPSYQHSDLSKIEIHRVWTSASKELPGKTLDFHFDISETPIIGRRYDELQNSSGRDGKPRAMAVTRSTSSTSSGSNSNVLVPVSWKRPQYSQKRTKEKLVHVLSLCGQEVGLSKNPSVIFSSCGDLDLLEHQTSLVSSEDGAREQENMDDTNSEQQFRVFRDFDFLDVELEDGEGESMDNFNWGVRRRSLDSLDKCDMQILEERQLSGSTPSLNKMHHEDSDESSEEEDLTASQILEHSDLIMTLSPSEETNPMELLTTACDSTPAEPHSFNTRMSSFDASLPDMNNLQISEGSKAEAVREEEDTTVHEDDLSSSINELPAAFECSDSFSLDMTEGEEKGNRALDQFTLASFGEGDRGVSPPPSPFFSAILAAFQPAACDDAEEAWRSHINQLMCDSDGSCAVYTFHVFSSLFKNIQKRFCFLTCDAASYLGDNLRGIGSKFVSSSQMLTSCSECPTLFVDAETLLSCGLLDKLKFSVLELQEYLDTYNNRKEATLSWLANCKATFAGGSRDGVITCQPGDSEEKQLELCQRLYKLHFQLLLLFQSYCKLIGQVHEVSSMPELLNMSRELSDLKKHLKEASAVIAADPLYSDGAWSEPTFTSTEAAIQSMLECLKNNELGKALRQIRECRSLWPNDIFGSSSDDEVQTLLNIYFRHQTLGQTGTYALVGSNQSLTEICTKLMELNMEIRDMIRRAQSYRVLTTFLPDSSVSGTSL

SEQ ID NO: 7091 - DNA, 5872 bp, Homo sapiens
actctaatcagttcagaaacagtggaacattttcctggctgctccagtttacacacacacacacatacacacacacacacaggtagtatacagtcttcatccattaaaaagcagcgacgtgattcttgaacattttcctggtgcatgaacttgcgtctttgccacgagtttaatctgaaggcacctgtccaacataaataataaaagaacattctaaaaatacccactgaaggaattaggtgtgtactggaaatacggtgctatgaagagccaattacaatttttcgtagcacaaacaaccaaagggagaacggtttctcaggagaggactcttgattcgcaggtgattttttcatcgtgtggggatctggatctgcttgagcaccagacaagcttggtatcttctgaggacggtgcccgagagcaggagaacatggatgacacaaacagcgagcagcagtttagagtcttcagagacttcgacttcctagatgtggagctggaggatggagagggtgagagtatggacaatttcaactggggagtgcgcagacgttctctggacagcctggataagtgtgatatgcagattctggaggagcgccaactgtcaggaagcactcctagcctgaataaaatgcaccatgaggactccgatgaatcatccgaggaggaggacctcacagccagccagatcctggagcactcagacctaatcatgactctctccccctctgaagagacgaatcccatggagctgctcaccacagcctgtgactcgacccctgcagaacctcattcctttaacaccagaatgtccagctttgatgcttccttgcctgatatgaataatctgcagatttctgagggttcaaaggctgaagctgttcgtgaggaggaggacaccaccgtgcatgaggatgatctttctagttccatcaatgaactcccagcagcttttgaatgcagcgacagctttagcctggacatgactgagggggaagaaaaaggcaatcgggcactggaccagtttaccctggcgaggtaatggagcccttggctgatgtgagtggtgtgaatgtgcatggtacattatatggcattcacactcaagttaagtgtcacagttgcactgctgggacatcctaataaaggactccaaagtgacatatatcatggcaggctctcagctgagttagagtcatccaatcccattatagggcctcgtgtggaacaaagaaagaacacttacatatgaattcataaggccagaaagcaacgtaaaaagcaaaggaagagcctggaaacatggtccagaccttgtaagctttgaagataagcaacacttggcaagccttggaaataagttctttccatttggagttaaaaccctggaacaagaggctctttatataggaaatacctactctttaagtgggtgtcttttggcctggtggctgatatttctgagactagtgagatatagaaacagaaaaaaaaaatgtgaagagaaatagataaacaccagaggttagattaatccagcatctagaataaatcacaaataataatgctacagatctacttcaggaaaagaaagttgagatcctaaaattactcttctgaaagttgaaaataagaactaagtaaaagcttctgatatgctagacaaaggccttctgttacagtgagcaatgtctgtccatcaaaggaaaaggttaaggtaacacctagagaagaatttgacctttcatttttattcattatctcttctttcttcctgcctctctgtctcactttccctgcgtatctctggtttccttgtctccctccacctttgtcttccaggcatttgtgcatatgcatttattaatactctccctccagaaaggaaaaattagaagattcaaaatttatataatttttcataatgaaaaatgaagaatgaaactgccaaagcataggactgtggtttactttggggcatagcctctgtgaaagtgagaggcattgctgaaggctaaaagaagtaccaagtctatagaaagggaatctgaaatggaggaatcccagaaattctagaggtgcaaattctctttcctcgaatcgtgaaagaatccgtgacctcttgccaggtgcggtggcacacacctgtaatcctcactttgggaggccgaggtgggcggatcacaaggtcaggagatcgagaccatcctggctaacacggtgaaaccccgtatctattaaaaatacaaaaaaaaaaaaaaaattagccgggtgtagtggcaggcgcctgtaatcccagctactcgggaggctgaggcaggagaatggcatgaccccggggggcagagcttgcagtgagccgagatcacaccactgcactccagcctgggcgacagagcgagactctgtctcaaaaaataaaaaaataaagataccttcagtgttgtgagcagcactgtattgtgatatgactctcaaaggtctgcaatataaatactgcatatggccagtccaggccaaggcagggctatttcatagaataaggagaaaaatccaccacctctgctccgtctgcatcgttggcactgatctctgatgactctgactttgacagctgtgcatatatggtcagataacctcctggagctgacctagccggtgcccatgatgccaggttgcccagtcggatgggtcttcagaggcaacatgtcaatcagtttccccacccccaagtctctaacagagagttattgccctctggatttgcccagctcaaactgcaaatgatgagtttaagggataatcaaaacagtctctggctgacggtaattcatggctttacacatggaactctaaccatgcgagactgacgagctcctggagggtgggagttgtgtgatacctttttttttttttagcccccatgatatgacagaatcatcacatgctcagtaattactgaggtttagaaccagtgaggatgtgctttgattttaaaagtctctgaagagtcaagtccttccaagaatctgtttggtggctgtcttatagcaaagaatacaatatgaaaagtcattctgtcttaaatgacttaaggtatagattaaatacaaaataagtttgaaagtctttttggaggtttgtcttcacactgcttggagtattattgggtgatgacagtagaagtcgtgtataaaatggaaaacatatcttagtgtgggcctttatgaaatacttggtatgtcttatctgcctatactaatatgggaaagaatggacgttttcataggaggtgtgcattatcaagctcggattcaattgtaattgcagctgatagttgagcaaaattccaaatttcacagcttattaaaatggatgacacttgtaccccttaacagcacttctaaatatacttctgttttctgtgtagccatgcctttgtgttggtatctctctagttttaataccaattattttcctgtctttagctcctttcatgtggacttctggacaagctcaagttcagtgtgttagaactgcaagaatatttggatacctacaacaacaggaaagaggccacactctctgtaagcttttgtgtttctatgcatatgcagtcagttaaaaccaaatgaacccaaccactctgagttcttgggcggggttgtgattaacttaagactttcagacttcatcttttcctttgttaaggattacaattccaatttaatggtggtagaactgtatacaatattaattatattacaaatggtatctacaaaagagaaatttttcagcattcacttttagccctaccaagaaattggaaaaaaaaatgggtatgtacttgatatgttacttaccaaagttacaacttttctcagatatttgaaattggtgattatttccttccagtgttagcctcacccaaaactagttgtggcagatctcctccctgttctcttagccactcttggaggctgcgtctgccagtccccagggcttctcttggcctcagctcttgctctttacttttttctttcttcatagatctagatcacaaaatgttagagacagagtgatctagaaaccatccaagcaagccacctgttttctgacagatgcacaggtggaggcccagagaagtcagtggttcaataataagaataattaattgtatgtagtatgtattaagcccttcctatagtatgccaggtactatagaaaaagcaagggttttgaagtcagattgacttcagtttaaatcacagctcagttatttaacggttagtgaccttgaataagtgacttgccgtctctcatctcagatgcagcatctgtaagcccttggtaataataactaatttgcaggattgttgtgaagatataacaattataatagtcatggcagctatcatttcctgagtcctttttatgtgtccaacaatctgctaagagttaaatctcttaaattatatcgtttaatgctcacaactaccctgagagttgctattgttaccctcattagctagctaggaactggaagagtgggattgaaacccagagctgtgggattcaaaggcccacgctcttaaccacatcatgatattgccttgaaaacagaaataatatctgtaaactgaccagcacaatgccacatagaaagaaaatgttcattgtaaagttatggtttggggtttgtttattgctattgctgttattgatgttatcttgacctgcccaagggcaagagttcaaactctccaccgtaacaattagctttgtcttctgtttctgtggccttttacctgccactcttttcagcttctcagtcatcacccagtaaaagtaatctttttattctggttggtgaactaatctagcctttaatgtcaagtgtgaacttcagttcctcagtgctcattgttttctgctgaaaggttccctttcacacctgtgttagttactaccccagatgcttaagactagcaggatctctcagtagctgagctattaccataatagcctttcttatagtgaaggagatctgccccatagcagatgcagccaccgcagcatgacagaagtaggtgtgtccaagtcaggtcatgttgaccagaatcacccagcctgtgaggaagtattggtcctgtcttctaaccccaattgtatggaagatttctagccatatatattcatttacacataaattagaaacagtgtggtgaaaccattccctagggcaacacagtataatattgaaattgtgtttttagatgaccattactgaacccatataaacagatacttttaatttccaacagttcatctttaacccccaaatacgacccttttcaaaaagtcattacagcacaatttcattttactattattagaactttaatgaattttttcctaatggaattataccaaaaatgttctcagaacattgctgaatttacctatgtctttccctctctttctgacagtggcttgcaaattgtaaggcaacatttgcagggggatcaagagatggagtaattacctgtcaaccaggggactccgaagaaaaggtaataaaagcctgttagaatgggtctcttgtgtgctctaacattgtgtattagttttggtctacccaagaagcctggaacttgagaaaagaagaggcggaatgagtcaccccaaacatttacatgaaaccaacagagtaagacagaatgccttccagcatgactgtgtgttgatgggatttgtggggaggtttcttcgttttggaaaagtagaggtataaaataaccttttttgctggatactgtctaactatactaataatttcctaataaatttattcttaattcagatt

SEQ ID NO: 7092 - protein, 261 aa, Homo sapiens
MKSQLQFFVAQTTKGRTVSQERTLDSQVIFSSCGDLDLLEHQTSLVSSEDGAREQENMDDTNSEQQFRVFRDFDFLDVELEDGEGESMDNFNWGVRRRSLDSLDKCDMQILEERQLSGSTPSLNKMHHEDSDESSEEEDLTASQILEHSDLIMTLSPSEETNPMELLTTACDSTPAEPHSFNTRMSSFDASLPDMNNLQISEGSKAEAVREEEDTTVHEDDLSSSINELPAAFECSDSFSLDMTEGEEKGNRALDQFTLAR

SEQ ID NO: 7093 - DNA, 723 bp, Homo sapiens
cgaggaggcctggcgcagccacatcaaccagcttatgtgtgactcagatggctcctgtgctgtgtatacatttcatgtgttctcctccttgtttaagaatattcagaaaaggttctgcttcctaacctgtgatgcagccagttaccttggagataacctccggggaatcggatccaaatttgtcagctcttcccagatgctcacctcctgctctgaatgtcctacactttttgtggatgccgagactctcctttcatgtggacttctggacaagctcaagttcagtgtgttagaactgcaagaatatttggatacctacaacaacaggaaagaggccacactctcttggcttgcaaattgtaaggcaacatttgcagggggatcaagagatggagtaattacctgtcaaccaggggactccgaagaaaaggtaataaaagcctgttagaatgggtctcttgtgtgctctaacattgtgtattagttttggtctacccaagaagcctggaacttgagaaaagaagaggcggaatgagtcaccccaaacatttacatgaaaccaacagagtaagacagaatgccttccagcatgactgtgtgttgatgggatttgtggggaggtttcttcgttttggaaaagtagaggtataaaataaccttttttgctggatactgtctaactatactaataatttcctaataaatttattcttaattcagatt

SEQ ID NO: 7094 - protein, 137 aa, Homo sapiens
MCDSDGSCAVYTFHVFSSLFKNIQKRFCFLTCDAASYLGDNLRGIGSKFVSSSQMLTSCSECPTLFVDAETLLSCGLLDKLKFSVLELQEYLDTYNNRKEATLSWLANCKATFAGGSRDGVITCQPGDSEEKVIKAC

SEQ ID NO: 7095 - DNA, 3384 bp, Homo sapiens
taatggaaattataccgtggatttctcactggtatttatttaatgactgtatttcatttttctgttttatttggaataacagctggttatgttttcttaatttaaaaaaaaagtttgtctccattgagatttcactagttatatgtgaatgatctttaacaataactgtttcttcccatgcaatttctctctttagcaattggaactgtgtcagagattatataagctacacttccagctgctattgctttttcagtcctactgtaagctcatcggccaggtgcacgaagttagctccatgccagagctgctgaatatgtccagggaactgagtgacctaaagaaacacctgaaggaagccagtgcagtcattgcagctgaccctctctattcagacggcgcgtggtccgagcccaccttcacgtccactgaagcagccatccagtccatgctggagtgcctgaagaacaacgaactcggcaaagctttgcggcagatcagggagtgcagaagtctgtggcccaatgacatctttggaagcagttctgatgatgaggtccagacactactgaatatttatttccgtcaccaaactctgggacagacgggtacttatgccctggtggggtctaaccagagcctgaccgagatctgcaccaagctgatggagctgaacatggagatccgggacatgatccgcagggcccagagttaccgagtcctcactacttttcttccagactccagtgtttctggcactagtctctgacaggagcctcctgtccccactgggttccaaactggcagtgctgccatgctggggcaacgtcattcagtgtcttctcggccttcaaaaggcttggacagactgttctccctcttgttacctgtagggctttttctaaagaggatggcagaacttccaacgtgtagcaatactataagaaccaaggtagcttagaacgtcctggacagactccactcatcatgctgtgtggcacaaatgtgttacatttgaccgagcatatgcaactcgctactgaagaagtgacttccgttgcataccaaagccgactacactgaacagtaccttcctttctagaaacaattttagattggcaaaagtgcaatgttttcttcactcaaaaaattttatattctcaaacatgtatattctttccctgtcttgttccattttcttttcttttttcttttttctttttcctttctttcgtgggctgagaaaggggcaggcaaaatgaagctggccactgaaaactgtaagatggtcaaaagctgacagcctgtgtatgtgaaaagggaattgtaaatggactgcaatgtaatgtacactgtaatttgaatacaattactgtatctaaaaggagctgctatgaagtacctttcttatgttgctaggctactgtttctgaaagccctggatctctttgcaccaaaaatggtccagatagactctttttaaggatcttggctgctttttactagaaggttgcttttatgagcatatttatactgctgaaggatgagtgttaattttaattaactttgccgttttgtagagaaaactattcacaagataaattccaagtcttttcacctgtcaggcatgcatattttaatatctgtttggatagtcagaagtagaatcataaaggtaaaatatgagttgttactttgtttcttcgatgtcatattttatgtgtaatatatatgtaaagggccattcttaagttctctccttaaacttaatgctgtcaagtgttagatgtgtgcatgtgaacttgttgcactgcagaaacatattcagagtttatctatgtaacttattcactctgtaaatacatttaaagtttttgtgatgtaagcttaattgatattctgttcagaactttctttagactaaaaaaaaaaaaaaagacaaaatacacgttgaccatggactttatttctggttaatgaaaatgtttgtcctgggcacacatgaagttttgcatgtgggttgccaaagtaataaccccaaggggcacccctcgcatgtatgatctgaatggcacccgtgggggtcatgccatgcatggccctgtgaagctggaggtaagtattatctctttggaagttggcatcaaaactgtgagcttcaaccaattctctgtaatcaaccaaagagaaaaatcagaaaaaagtgagagctctaattctccataacctataattaggttgtcatccttcaaatttggaagttaattctatagtgagcaggaaaaagtagtagagttgtaattctgtcaccaacacctatcccccaggaacacagggagaaacatgtaacaatctcatttatgccgtctttctactcatattttacatggaccaacaaatatagcttgctttactagcatatggctactgaatcattggcagtaatattctaggagtattctatagaagagagcctaacctaggattttttttaaatcctagtagttgctacagatgcaactactagattttaataattttctggactgctgaaaacatatttttctgatgatttatttttttcaacttgcctgaaagatgatttgctatgatttgtagaaacaactgaatcatgatctctctgaaaaatatcataaaataaaggtttctgtggctaaccacagtagacaactttcagagagttttgttgggagccacagtagaaagaacagattcgtcatgaactgagttttctaccatggcttcttacccagcagagaaccaccgtgatggtttactcttaaaaagggaaggaaaaaaaaaaaggatttcaacagtacattacaatccaagatattaacataggaagcagtggtctgtgtttttctcaattttatttttaaaaggagatgtattaatgtgaaaggtttcttctacttttcctctatctcttcacctcctctactttaagtggagatgggaaaaattgtgtaggatgcagccccacgccagcagagcccagcaataactttagatctaccagtcaaatcttgtcggctattgctctgtgcctctgttacagaagcattaatgttaattgccttccccagggatacaaagaagtagaagtaccaaaggaaagggtagatatttaacagatgcctcagtgataagaaagatgcctccttgtgtctcactgttttctagcactgaaacatgatacactttgtatccacctgcagaataaagcaatccagacaggcgctctgtaacttagacatcacttgattaaaattatagtctccaaatatagtgttttagaaaaggcactgcacatttttagaggcacgtgaatgtcattcccacctctaacccatctaacat

SEQ ID NO: 7096 - protein, 156 aa, Homo sapiens [sequence omitted]

SEQ ID NO: 7097 - DNA, 3208 bp, Homo sapiens
atcctatctgaatttaccaaggtattaagcttatgcttaaccacacccataagatcctttttttttccttttgggatgtaaaattcccccagcacctaaatatagtttaaaaaacatttttttttaaatagctgctgaatatgtccagggaactgagtgacctaaagaaacacctgaaggaagccagtgcagtcattgcagctgaccctctctattcagacggcgcgtggtccgagcccaccttcacgtccactgaagcagccatccagtccatgctggagtgcctgaagaacaacgaactcggcaaagctttgcggcagatcagggagtgcagaagtctgtggcccaatgacatctttggaagcagttctgatgatgaggtccagacactactgaatatttatttccgtcaccaaactctgggacagacgggtacttatgccctggtggggtctaaccagagcctgaccgagatctgcaccaagctgatggagctgaacatggagatccgggacatgatccgcagggcccagagttaccgagtcctcactacttttcttccagactccagtgtttctggcactagtctctgacaggagcctcctgtccccactgggttccaaactggcagtgctgccatgctggggcaacgtcattcagtgtcttctcggccttcaaaaggcttggacagactgttctccctcttgttacctgtagggctttttctaaagaggatggcagaacttccaacgtgtagcaatactataagaaccaaggtagcttagaacgtcctggacagactccactcatcatgctgtgtggcacaaatgtgttacatttgaccgagcatatgcaactcgctactgaagaagtgacttccgttgcataccaaagccgactacactgaacagtaccttcctttctagaaacaattttagattggcaaaagtgcaatgttttcttcactcaaaaaattttatattctcaaacatgtatattctttccctgtcttgttccattttcttttcttttttcttttttctttttcctttctttcgtgggctgagaaaggggcaggcaaaatgaagctggccactgaaaactgtaagatggtcaaaagctgacagcctgtgtatgtgaaaagggaattgtaaatggactgcaatgtaatgtacactgtaatttgaatacaattactgtatctaaaaggagctgctatgaagtacctttcttatgttgctaggctactgtttctgaaagccctggatctctttgcaccaaaaatggtccagatagactctttttaaggatcttggctgctttttactagaaggttgcttttatgagcatatttatactgctgaaggatgagtgttaattttaattaactttgccgttttgtagagaaaactattcacaagataaattccaagtcttttcacctgtcaggcatgcatattttaatatctgtttggatagtcagaagtagaatcataaaggtaaaatatgagttgttactttgtttcttcgatgtcatattttatgtgtaatatatatgtaaagggccattcttaagttctctccttaaacttaatgctgtcaagtgttagatgtgtgcatgtgaacttgttgcactgcagaaacatattcagagtttatctatgtaacttattcactctgtaaatacatttaaagtttttgtgatgtaagcttaattgatattctgttcagaactttctttagactaaaaaaaaaaaaaaagacaaaatacacgttgaccatggactttatttctggttaatgaaaatgtttgtcctgggcacacatgaagttttgcatgtgggttgccaaagtaataaccccaaggggcacccctcgcatgtatgatctgaatggcacccgtgggggtcatgccatgcatggccctgtgaagctggaggtaagtattatctctttggaagttggcatcaaaactgtgagcttcaaccaattctctgtaatcaaccaaagagaaaaatcagaaaaaagtgagagctctaattctccataacctataattaggttgtcatccttcaaatttggaagttaattctatagtgagcaggaaaaagtagtagagttgtaattctgtcaccaacacctatcccccaggaacacagggagaaacatgtaacaatctcatttatgccgtctttctactcatattttacatggaccaacaaatatagcttgctttactagcatatggctactgaatcattggcagtaatattctaggagtattctatagaagagagcctaacctaggattttttttaaatcctagtagttgctacagatgcaactactagattttaataattttctggactgctgaaaacatatttttctgatgatttatttttttcaacttgcctgaaagatgatttgctatgatttgtagaaacaactgaatcatgatctctctgaaaaatatcataaaataaaggtttctgtggctaaccacagtagacaactttcagagagttttgttgggagccacagtagaaagaacagattcgtcatgaactgagttttctaccatggcttcttacccagcagagaaccaccgtgatggtttactcttaaaaagggaaggaaaaaaaaaaaggatttcaacagtacattacaatccaagatattaacataggaagcagtggtctgtgtttttctcaattttatttttaaaaggagatgtattaatgtgaaaggtttcttctacttttcctctatctcttcacctcctctactttaagtggagatgggaaaaattgtgtaggatgcagccccacgccagcagagcccagcaataactttagatctaccagtcaaatcttgtcggctattgctctgtgcctctgttacagaagcattaatgttaattgccttccccagggatacaaagaagtagaagtaccaaaggaaagggtagatatttaacagatgcctcagtgataagaaagatgcctccttgtgtctcactgttttctagcactgaaacatgatacactttgtatccacctgcagaataaagcaatccagacaggcgctctgtaacttagacatcacttgattaaaattatagtctccaaatatagtgttttagaaaaggcactgcacatttttagaggcacgtgaatgtcattcccacctctaacccatctaacat

SEQ ID NO: 7098 - protein, 150 aa, Homo sapiens [sequence omitted]

SEQ ID NO: 7099 - DNA, 437 bp, Homo sapiens
gcgtgaacatccagagttaggtctcaaggctcttctggttctaagtcctaacaaacaatgatcttttcagtgaactgtagaattctggaaagaataagcgtacctccaggctgcttacatcaatagcttacacgtgcttcctgatgcctgccttaacaacaaaaaattcgtgtccatagcaaatatttattgcatgcccactctgggctaggcactgttttagaggacaccgcagctatcaaggcagatgtggtccctgttcccatgaggctcctacatttgagtggaggaagatgtacttgtctacgttgggtgatgattagtgccatgaagaacaaaacggatacagtgagtaatgtggacagggctatcttagctatcactctaataaggtgatatctgaggagagatctgaatgaagtgaggatacaatggat

SEQ ID NO: 7100 - protein, 43 aa, Homo sapiens
MRLLHLSGGRCTCLRWVMISAMKNKTDTVSNVDRAILAITLIR

SEQ ID NO: 7101 - DNA, 2038 bp, Homo sapiens
gggcttgtggcgcgagcttctgaaactaggcggcagaggcggagccgctgtggcactgctgcgcctctgctgcgcctcgggtgtcttttgcggcggtgggtcgccgccgggagaagcgtgaggggacagatttgtgaccggcgcggtttttgtcagcttactccggccaaaaaagaactgcacctctggagcggacttatttaccaagcattggaggaatatcgtaggtaaaaatgcctattggatccaaagagaggccaacattttttgaaatttttaagacacgctgcaacaaagcagatttaggaccaataagtcttaattggtttgaagaactttcttcagaagctccaccctataattctgaacctgcagaagaatctgaacataaaaacaacaattacgaaccaaacctatttaaaactccacaaaggaaaccatcttataatcagctggcttcaactccaataatattcaaagagcaagggctgactctgccgctgtaccaatctcctgtaaaagaattagataaattcaaattagacttaggaaggaatgttcccaatagtagacataaaagtcttcgcacagtgaaaactaaaatggatcaagcagatgatgtttcctgtccacttctaaattcttgtcttagtgaaagtcctgttgttctacaatgtacacatgtaacaccacaaagagataagtcagtggtatgtgggagtttgtttcatacaccaaagtttgtgaagggtcgtcagacaccaaaacatatttctgaaagtctaggagctgaggtggatcctgatatgtcttggtcaagttctttagctacaccacccacccttagttctactgtgctcatagtcagaaatgaagaagcatctgaaactgtatttcctcatgatactactgctaatgtgaaaagctatttttccaatcatgatgaaagtctgaagaaaaatgatagatttatcgcttctgtgacagacagtgaaaacacaaatcaaagagaagctgcaagtcatggatttggaaaaacatcagggaattcatttaaagtaaatagctgcaaagaccacattggaaagtcaatgccaaatgtcctagaagatgaagtatatgaaacagttgtagatacctctgaagaagatagtttttcattatgtttttctaaatgtagaacaaaaaatctacaaaaagtaagaactagcaagactaggaaaaaaattttccatgaagcaaacgctgatgaatgtgaaaaatctaaaaaccaagtgaaagaaaaatactcatttgtatctgaagtggaaccaaatgatactgatccattagattcaaatgtagcaaatcagaagccctttgagagtggaagtgacaaaatctccaaggaagttgtaccgtctttggcctgtgaatggtctcaactaaccctttcaggtctaaatggagcccagatggagaaaatacccctattgcatatttcttcatgtgaccaaaatatttcagaaaaagacctattagacacagagaacaaaagaaagaaagattttcttacttcagagaattctttgccacgtatttctagcctaccaaaatcagagaagccattaaatgaggaaacagtggtaaataagagagatgaagagcagcatcttgaatctcatacagactgcattcttgcagtaaagcaggcaatatctggaacttctccagtggcttcttcatttcagggtatcaaaaagtctatattcagaataagagaatcacctaaagagactttcaatgcaagtttttcaggtcatatgactgatccaaactttaaaaaagaaactgaagcctctgaaagtggactggaaatacatactgtttgctcacagaaggaggactccttatgtccaaatttaattgataatggaagctggccagccaccaccacacagaattctgtagctttgaagaatgcaggtttaatatccactttgaaaaagaaaacaaataagtttatttatgctatacatgatgaaacatcttataaagg

SEQ ID NO: 7102 - protein, 600 aa, Homo sapiens
MPIGSKERPTFFEIFKTRCNKADLGPISLNWFEELSSEAPPYNSEPAEESEHKNNNYEPNLFKTPQRKPSYNQLASTPIIFKEQGLTLPLYQSPVKELDKFKLDLGRNVPNSRHKSLRTVKTKMDQADDVSCPLLNSCLSESPVVLQCTHVTPQRDKSVVCGSLFHTPKFVKGRQTPKHISESLGAEVDPDMSWSSSLATPPTLSSTVLIVRNEEASETVFPHDTTANVKSYFSNHDESLKKNDRFIASVTDSENTNQREAASHGFGKTSGNSFKVNSCKDHIGKSMPNVLEDEVYETVVDTSEEDSFSLCFSKCRTKNLQKVRTSKTRKKIFHEANADECEKSKNQVKEKYSFVSEVEPNDTDPLDSNVANQKPFESGSDKISKEVVPSLACEWSQLTLSGLNGAQMEKIPLLHISSCDQNISEKDLLDTENKRKKDFLTSENSLPRISSLPKSEKPLNEETVVNKRDEEQHLESHTDCILAVKQAISGTSPVASSFQGIKKSIFRIRESPKETFNASFSGHMTDPNFKKETEASESGLEIHTVCSQKEDSLCPNLIDNGSWPATTTQNSVALKNAGLISTLKKKTNKFIYAIHDETSY

SEQ ID NO: 7103 - DNA, 8192 bp, Homo sapiens
gggcttgtggcgcgagcttctgaaactaggcggcagaggcggagccgctgtggcactgctgcgcctctgctgcgcctcgggtgtcttttgcggcggtgggtcgccgccgggagaagcgtgaggggacagatttgtgaccggcgcggtttttgtcagcttactccggccaaaaaagaactgcacctctggagcggacttatttaccaagcattggaggaatatcgtaggtaaaaatgcctattggatccaaagagaggccaacattttttgaaatttttaagacacgctgcaacaaagcagatttaggaccaataagtcttaattggtttgaagaactttcttcagaagctccaccctataattctgaacctgcagaagaatctgaacataaaaacaacaattacgaaccaaacctatttaaaactccacaaaggaaaccatcttataatcagctggcttcaactccaataatattcaaagagcaagggctgactctgccgctgtaccaatctcctgtaaaagaattagataaattcaaattagacttaggaaggaatgttcccaatagtagacataaaagtcttcgcacagtgaaaactaaaatggatcaagcagatgatgtttcctgtccacttctaaattcttgtcttagtgaaagtcctgttgttctacaatgtacacatgtaacaccacaaagagataagtcagtggtatgtgggagtttgtttcatacaccaaagtttgtgaagggtcgtcagacaccaaaacatatttctgaaagtctaggagctgaggtggatcctgatatgtcttggtcaagttctttagctacaccacccacccttagttctactgtgctcatagtcagaaatgaagaagcatctgaaactgtatttcctcatgatactactgctaatgtgaaaagctatttttccaatcatgatgaaagtctgaagaaaaatgatagatttatcgcttctgtgacagacagtgaaaacacaaatcaaagagaagctgcaagtcatggatttggaaaaacatcagggaattcatttaaagtaaatagctgcaaagaccacattggaaagtcaatgccaaatgtcctagaagatgaagtatatgaaacagttgtagatacctctgaagaagatagtttttcattatgtttttctaaatgtagaacaaaaaatctacaaaaagtaagaactagcaagactaggaaaaaaattttccatgaagcaaacgctgatgaatgtgaaaaatctaaaaaccaagtgaaagaaaaatactcatttgtatctgaagtggaaccaaatgatactgatccattagattcaaatgtagcaaatcagaagccctttgagagtggaagtgacaaaatctccaaggaagttgtaccgtctttggcctgtgaatggtctcaactaaccctttcaggtctaaatggagcccagatggagaaaatacccctattgcatatttcttcatgtgaccaaaatatttcagaaaaagacctattagacacagagaacaaaagaaagaaagattttcttacttcagagaattctttgccacgtatttctagcctaccaaaatcagagaagccattaaatgaggaaacagtggtaaataagagagatgaagagcagcatcttgaatctcatacagactgcattcttgcagtaaagcaggcaatatctggaacttctccagtggcttcttcatttcagggtatcaaaaagtctatattcagaataagagaatcacctaaagagactttcaatgcaagtttttcaggtcatatgactgatccaaactttaaaaaagaaactgaagcctctgaaagtggactggaaatacatactgtttgctcacagaaggaggactccttatgtccaaatttaattgataatggaagctggccagccaccaccacacagaattctgtagctttgaagaatgcaggtttaatatccactttgaaaaagaaaacaaataagtttatttatgctatacatgatgaaacatcttataaaggaaaaaaaataccgaaagaccaaaaatcagaactaattaactgttcagcccagtttgaagcaaatgcttttgaagcaccacttacatttgcaaatgctgattcaggtttattgcattcttctgtgaaaagaagctgttcacagaatgattctgaagaaccaactttgtccttaactagctcttttgggacaattctgaggaaatgttctagaaatgaaacatgttctaataatacagtaatctctcaggatcttgattataaagaagcaaaatgtaataaggaaaaactacagttatttattaccccagaagctgattctctgtcatgcctgcaggaaggacagtgtgaaaatgatccaaaaagcaaaaaagtttcagatataaaagaagaggtcttggctgcagcatgtcacccagtacaacattcaaaagtggaatacagtgatactgactttcaatcccagaaaagtcttttatatgatcatgaaaatgccagcactcttattttaactcctacttccaaggatgttctgtcaaacctagtcatgatttctagaggcaaagaatcatacaaaatgtcagacaagctcaaaggtaacaattatgaatctgatgttgaattaaccaaaaatattcccatggaaaagaatcaagatgtatgtgctttaaatgaaaattataaaaacgttgagctgttgccacctgaaaaatacatgagagtagcatcaccttcaagaaaggtacaattcaaccaaaacacaaatctaagagtaatccaaaaaaatcaagaagaaactacttcaatttcaaaaataactgtcaatccagactctgaagaacttttctcagacaatgagaataattttgtcttccaagtagctaatgaaaggaataatcttgctttaggaaatactaaggaacttcatgaaacagacttgacttgtgtaaacgaacccattttcaagaactctaccatggttttatatggagacacaggtgataaacaagcaacccaagtgtcaattaaaaaagatttggtttatgttcttgcagaggagaacaaaaatagtgtaaagcagcatataaaaatgactctaggtcaagatttaaaatcggacatctccttgaatatagataaaataccagaaaaaaataatgattacatgaacaaatgggcaggactcttaggtccaatttcaaatcacagttttggaggtagcttcagaacagcttcaaataaggaaatcaagctctctgaacataacattaagaagagcaaaatgttcttcaaagatattgaagaacaatatcctactagtttagcttgtgttgaaattgtaaataccttggcattagataatcaaaagaaactgagcaagcctcagtcaattaatactgtatctgcacatttacagagtagtgtagttgtttctgattgtaaaaatagtcatataacccctcagatgttattttccaagcaggattttaattcaaaccataatttaacacctagccaaaaggcagaaattacagaactttctactatattagaagaatcaggaagtcagtttgaatttactcagtttagaaaaccaagctacatattgcagaagagtacatttgaagtgcctgaaaaccagatgactatcttaaagaccacttctgaggaatgcagagatgctgatcttcatgtcataatgaatgccccatcgattggtcaggtagacagcagcaagcaatttgaaggtacagttgaaattaaacggaagtttgctggcctgttgaaaaatgactgtaacaaaagtgcttctggttatttaacagatgaaaatgaagtggggtttaggggcttttattctgctcatggcacaaaactgaatgtttctactgaagctctgcaaaaagctgtgaaactgtttagtgatattgagaatattagtgaggaaacttctgcagaggtacatccaataagtttatcttcaagtaaatgtcatgattctgttgtttcaatgtttaagatagaaaatcataatgataaaactgtaagtgaaaaaaataataaatgccaactgatattacaaaataatattgaaatgactactggcacttttgttgaagaaattactgaaaattacaagagaaatactgaaaatgaagataacaaatatactgctgccagtagaaattctcataacttagaatttgatggcagtgattcaagtaaaaatgatactgtttgtattcataaagatgaaacggacttgctatttactgatcagcacaacatatgtcttaaattatctggccagtttatgaaggagggaaacactcagattaaagaagatttgtcagatttaacttttttggaagttgcgaaagctcaagaagcatgtcatggtaatacttcaaataaagaacagttaactgctactaaaacggagcaaaatataaaagattttgagacttctgatacattttttcagactgcaagtgggaaaaatattagtgtcgccaaagagtcatttaataaaattgtaaatttctttgatcagaaaccagaagaattgcataacttttccttaaattctgaattacattctgacataagaaagaacaaaatggacattctaagttatgaggaaacagacatagttaaacacaaaatactgaaagaaagtgtcccagttggtactggaaatcaactagtgaccttccagggacaacccgaacgtgatgaaaagatcaaagaacctactctattgggttttcatacagctagcgggaaaaaagttaaaattgcaaaggaatctttggacaaagtgaaaaacctttttgatgaaaaagagcaaggtactagtgaaatcaccagttttagccatcaatgggcaaagaccctaaagtacagagaggcctgtaaagaccttgaattagcatgtgagaccattgagatcacagctgccccaaagtgtaaagaaatgcagaattctctcaataatgataaaaaccttgtttctattgagactgtggtgccacctaagctcttaagtgataatttatgtagacaaactgaaaatctcaaaacatcaaaaagtatctttttgaaagttaaagtacatgaaaatgtagaaaaagaaacagcaaaaagtcctgcaacttgttacacaaatcagtccccttattcagtcattgaaaattcagccttagctttttacacaagttgtagtagaaaaacttctgtgagtcagacttcattacttgaagcaaaaaaatggcttagagaaggaatatttgatggtcaaccagaaagaataaatactgcagattatgtaggaaattatttgtatgaaaataattcaaacagtactatagctgaaaatgacaaaaatcatctctccgaaaaacaagatacttatttaagtaacagtagcatgtctaacagctattcctaccattctgatgaggtatataatgattcaggatatctctcaaaaaataaacttgattctggtattgagccagtattgaagaatgttgaagatcaaaaaaacactagtttttccaaagtaatatccaatgtaaaagatgcaaatgcatacccacaaactgtaaatgaagatatttgcgttgaggaacttgtgactagctcttcaccctgcaaaaataaaaatgcagccattaaattgtccatatctaatagtaataattttgaggtagggccacctgcatttaggatagccagtggtaaaatcgtttgtgtttcacatgaaacaattaaaaaagtgaaagacatatttacagacagtttcagtaaagtaattaaggaaaacaacgagaataaatcaaaaatttgccaaacgaaaattatggcaggttgttacgaggcattggatgattcagaggatattcttcataactctctagataatgatgaatgtagcacgcattcacataaggtttttgctgacattcagagtgaagaaattttacaacataaccaaaatatgtctggattggagaaagtttctaaaatatcaccttgtgatgttagtttggaaacttcagatatatgtaaatgtagtatagggaagcttcataagtcagtctcatctgcaaatacttgtgggatttttagcacagcaagtggaaaatctgtccaggtatcagatgcttcattacaaaacgcaagacaagtgttttctgaaatagaagatagtaccaagcaagtcttttccaaagtattgtttaaaagtaacgaacattcagaccagctcacaagagaagaaaatactgctatacgtactccagaacatttaatatcccaaaaaggcttttcatataatgtggtaaattcatctgctttctctggatttagtacagcaagtggaaagcaagtttccattttagaaagttccttacacaaagttaagggagtgttagaggaatttgatttaatcagaactgagcatagtcttcactattcacctacgtctagacaaaatgtatcaaaaatacttcctcgtgttgataagagaaacccagagcactgtgtaaactcagaaatggaaaaaacctgcagtaaagaatttaaattatcaaataacttaaatgttgaaggtggttcttcagaaaataatcactctattaaagtttctccatatctctctcaatttcaacaagacaaacaacagttggtattaggaaccaaagtgtcacttgttgagaacattcatgttttgggaaaagaacaggcttcacctaaaaacgtaaaaatggaaattggtaaaactgaaactttttctgatgttcctgtgaaaacaaatatagaagtttgttctacttactccaaagattcagaaaactactttgaaacagaagcagtagaaattgctaaagcttttatggaagatgatgaactgacagattctaaactgccaagtcatgccacacattctctttttacatgtcccgaaaatgaggaaatggttttgtcaaattcaagaattggaaaaagaagaggagagccccttatcttagtgggagaaccctcaatcaaaagaaacttattaaatgaatttgacaggataatagaaaatcaagaaaaatccttaaaggcttcaaaaagcactccagatggcacaataaaagatcgaagattgtttatgcatcatgtttctttagagccgattacctgtgtaccctttcgcacaactaaggaacgtcaagagatacagaatccaaattttaccgcacctggtcaagaatttctgtctaaatctcatttgtatgaacatctgactttggaaaaatcttcaagcaatttagcagtttcaggacatccattttatcaagtttctgctacaagaaatgaaaaaatgagacacttgattactacaggcagaccaaccaaagtctttgttccaccttttaaaactaaatcacattttcacagagttgaacagtgtgttaggaatattaacttggaggaaaacagacaaaagcaaaacattgatggacatggctctgatgatagtaaaaataagattaatgacaatgagattcatcagtttaacaaaaacaactccaatcaagcagtagctgtaactttcacaaagtgtgaagaagaacctttagatttaattacaagtcttcagaatgccagagatatacaggatatgcgaattaagaagaaacaaaggcaacgcgtctttccacagccaggcagtctgtatcttgcaaaaacatccactctgcctcgaatctctctgaaagcagcagtaggaggccaagttccctctgcgtgttctcataaacagctgtatacgtatggcgtttctaaacattgcataaaaattaacagcaaaaatgcagagtcttttcagtttcacactgaagattattttggtaaggaaagtttatggactggaaaaggaatacagttggctgatggtggatggctcataccctccaatgatggaaaggctggaaaagaagaattttatagggctctgtgtgacactccaggtgtggatccaaagcttatttctagaatttgggtttataatcactatagatggatcatatggaaactggcagctatggaatgtgcctttcctaaggaatttgctaatagatgcctaagcccagaaagggtgctt

SEQ ID NO: 7104 - protein, 3418 aa, Homo sapiens [sequence omitted]

SEQ ID NO: 7105 - DNA, 369 bp, Homo sapiens
gatgcccatgaaggggaaaaataagcaggcaaaaaccaaaaaacagaaaccaactctcaaaactccagcagaaggcaatgaagctgttaatattttggagttgattgaccaccagttgagagcctgcagttcatcagttgagagtgacaattccagagtgaccagctgagcatgtaatatgaaggaaactggagaaaagcctcaactactttatgattattcctatgatttgttcttaaagcagagaagcatctttttatttgtttttgatatccttgtttgatgaaaccagcatcgttttagaaaaaatatctttgttttagtaaaaatgacacatactcattgaaaaaataaaccccttcaaaactg

SEQ ID NO: 7106 - protein, 55 aa, Homo sapiens
MPMKGKNKQAKTKKQKPTLKTPAEGNEAVNILELIDHQLRACSSSVESDNSRVTS

SEQ ID NO: 7107 - DNA, 466 bp, Homo sapiens
atgtcaagagtagataatgttgatgactaatggaagagtagtttatacagcgtggatacgctgggcaaagagatggttcacattccacttggagcaggatggtgcaagatttcatcacacttctcagaacaacacacagtttaaaacttaatgacttttttatttctggaatttctcatttaaaatttttggaccacagttgactgcaggttgtaaagctctctgaaatagtgaccttagcgaagcaagcacatgtggatgtgaaatttcagttgccaatatgatctgaaaacccagtggatggctgaaggagttgattgaccaccagttgagagcctgcagttcatcagttgagagtgacaattccagagtgaccagctgagcatgtaatatgaaggaaactggagaaaagcctcaactactttatgattattcctatgatttgttcttaaagcagagaagcatc

SEQ ID NO: 7108 - protein, 44 aa, Homo sapiens
MLMTNGRVVYTAWIRWAKRWFTFHLEQDGARFHHTSQNNTQFKT

SEQ ID NO: 7109 - DNA, 2478 bp, Homo sapiens
ctggatgtggtgatctggtgagttgcagttcttcgatacatttttttgagaggtcccaaggtcccttcctgaggaaaaactcctaagttttaagctttaagaccagaaaggtcaatttctgtgtttatccaaaagaacagtctatgggactgttgggtcagtttcagtcttccctttctatttatcagttcctcaatcatgaggaatccagtcattggtctttctggctgcttcatgctgaggaagggtgtcataggcagctccataccataggtgaccatgtagccacccaggaatcaaagtttcatctaatagagagtttcttctgacacataatatttctctctctggtgtaccacttccaccaaagacaaatcacagcaggatctacctgcaaaataagcttctaccaatctacctgcaaaataatcttcagtcccatatacttggcctgattacccacacacagtgcgacaagaatcattgcccatagattcttccaaattggctttgctggaacatttcacaaggtcatttgagtcaaagtcctaggaaaatagccagttcctctggctgtgtcccattacaaaagaaaacaggtttttattaaatatatgcaaataaacacattttccatgaattaagaatattcacagtttccaaattctggagaaattaggcagagagagaaatatgcctcaaattctacttattaaagtatcctctactcaatacacttaaagtatatatcaaggctatatatagctcaaaaggaacatattctccagactctgaaaaacaaaaaacaaacaaaagaatcatcaatatttcaaacaaaaaaagccataaaaattatttcagtcttcattatttcagtccatgcaatgaactcctgctctgcttcatattgggttagcaatctttataaacacatcagctctttaattagagtcctgaaaggtctctctaatccaggggcacaaactgcaaagtttttagaaacctgcattaaagaatccttttcatgaactcctccaaagaagcaagccctggaccatagtattgtgtatggatgcaaagatcaattttgactctaattcagcctatcgccaaaagaaaatctttgatctacaggactggacccaggaagatgaaagggacaaagatgctgctaaggcaaatctcaactacattggcctcgatggaaatataggctgcctaggtaccatgtgtttttatgttagaattggattcactaagtttaatttggatttactaagtttaatttattttctctgtgtttgttgcttatacaaatcattttcccctatatagtaaatggtgctggtttggctatggccacaatggatataataaaacttcatggagggactccagccaacttccttgatgttggtggtggtgctacagtccatcaagtaacagaagcatttaagcttatcacttcagataaaaaggtactggctattctggtcaacatttttggaggaatcatgcgctgtgatgttattgcacagggtatagtcatggcagtaaaagacttggaaattaaaatacctgttgtggtacggttacaaggtacacgagtcgatgatgctaaggcactgatagcggacagtggacttaaaatacttgcttgtgatgacttggatgaagctgctagaatggttgtaaagctctctgaaatagtgaccttagcgaagcaagcacatgtggatgtgaaatttcagttgccaatatgatctgaaaacccagtggatggctgaaggtgttaaatgtgctataatcattaagaatactgtgttctgtgttattgttctttttctttttagtgtgtggagattgtaattgccatctaggcacacaaacatttaaaaggatttggactgcatttaattgtaccattcagaatggactgtttgtacgaagcatgtataatgcagttatcttctttcttttgtcgcagccagtcttttttgcttctcctacaaaacgtaacttgcaatttgccagtttattattgttggatacaaagttcttcattgataagagtcctataaataagataaatacgaagataaagctttattctttagtgttaaaatacagtatatctaataactagcctcattagtagagcagtatattaaaacaatgttttatgtaaaaagtgtttatcttcagcaccaaatacatgataaatgtatcaatcactatttataaacagagctttcaaacactcctcagaatattcttctaagtattttgatgaagtaactttgtaattatttgaacattgttttaatcattaggaaacactgattaactgcaagtcttcatgattctgtcatattaagaaacacctgtaggtttgcttcaaataaaggcatatataccaaggacttacagacaaaattaagaatgtcaatttaagttaataaaaatctcccaatatga

SEQ ID NO: 7110 - protein, 135 aa, Homo sapiens [sequence omitted]

SEQ ID NO: 7111 - DNA, 2067 bp, Homo sapiens
gaggggacggggtccgactcagaaatggcggcctccatgttctacggcaggctagtggccgtggccacccttcggaaccaccggcctcggacggcccacagcaacagcaaaggaatctctcactacatgaatacatgagtatggaattattgcaagaagctggtgtctccgttcccaaaggatatgtggcaaagtcaccagatgaagcttatgcaattgccaaaaaattaggttcaaaagatgtcgtgataaaggcacaggttttagctggtggtagaggaaaaggaacatttgaaagtggcctcaaaggaggagtgaagatagttttctctccagaagaagcaaaagctgtttcttcacaaatgattgggaaaaaattgtttaccaagcaaacgggagaaaagggcagaatatgcaatcaagtattggtctgtgagcgaaaatatcccaggagagaatactactttgcaataacaatggaaaggtcatttcaaggtcctgtattaataggaagttcacatggtggtgtcaacattgaagatgttgctgctgagtctcctgaagcaataattaaagaacctattgatattgaagaaggcatcaaaaaggaacaagctctccagcttgcacagaagatgggatttccacctaatattgtggaatcagcagcagaaaacatggtcaagctttacagcctttttctgaaatacgatgcaaccatgatagaaataaatccaatggtggaagattcagatggagctgtattgtgtatggatgcaaagatcaattttgactctaattcagcctatcgccaaaagaaaatctttgatctacaggactggacccaggaagatgaaagggacaaagatgctgctaaggcaaatctcaactacattggcctcgatggaaatataggctgcctagtaaatggtgctggtttggctatggccacaatggatataataaaacttcatggagggactccagccaacttccttgatgttggtggtggtgctacagtccatcaagtaacagaagcatttaagcttatcacttcagataaaaaggtactggctattctggtcaacatttttggaggaatcatgcgctgtgatgttattgcacagggtatagtcatggcagtaaaagacttggaaattaaaatacctgttgtggtacggttacaaggtacacgagtcgatgatgctaaggcactgatagcggacagtggacttaaaatacttgcttgtgatgacttggatgaagctgctagaatggttgtaaagctctctgaaatagtgaccttagcgaagcaagcacatgtggatgtgaaatttcagttgccaatatgatctgaaaacccagtggatggctgaaggtgttaaatgtgctataatcattaagaatactgtgttctgtgttattgttctttttctttttagtgtgtggagattgtaattgccatctaggcacacaaacatttaaaaggatttggactgcatttaattgtaccattcagaatggactgtttgtacgaagcatgtataatgcagttatcttctttcttttgtcgcagccagtcttttttgcttctcctacaaaacgtaacttgcaatttgccagtttattattgttggatacaaagttcttcattgataagagtcctataaataagataaatacgaagataaagctttattctttagtgttaaaatacagtatatctaataactagcctcattagtagagcagtatattaaaacaatgttttatgtaaaaagtgtttatcttcagcaccaaatacatgataaatgtatcaatcactatttataaacagagctttcaaacactcctcagaatattcttctaagtattttgatgaagtaactttgtaattatttgaacattgttttaatcattaggaaacactgattaactgcaagtcttcatgattctgtcatattaagaaacacctgtaggtttgcttcaaataaaggcatatataccaaggacttacagacaaaattaagaatgtcaatttaagttaataaaaatctcccaatatga

SEQ ID NO: 7112 - protein, 405 aa, Homo sapiens
MSMELLQEAGVSVPKGYVAKSPDEAYAIAKKLGSKDVVIKAQVLAGGRGKGTFESGLKGGVKIVFSPEEAKAVSSQMIGKKLFTKQTGEKGRICNQVLVCERKYPRREYYFAITMERSFQGPVLIGSSHGGVNIEDVAAESPEAIIKEPIDIEEGIKKEQALQLAQKMGFPPNIVESAAENMVKLYSLFLKYDATMIEINPMVEDSDGAVLCMDAKINFDSNSAYRQKKIFDLQDWTQEDERDKDAAKANLNYIGLDGNIGCLVNGAGLAMATMDIIKLHGGTPANFLDVGGGATVHQVTEAFKLITSDKKVLAILVNIFGGIMRCDVIAQGIVMAVKDLEIKIPVVVRLQGTRVDDAKALIADSGLKILACDDLDEAARMVVKLSEIVTLAKQAHVDVKFQLPI

SEQ ID NO: 7113 - DNA, 2183 bp, Homo sapiens
agagaggctgcgccttgggccgcctgtcgcctgtgcgcctgcgcgcggcgccgaggggacggggtccgactcagaaatggcggcctccatgttctacggcaggctagtggccgtggccacccttcggaaccaccggcctcggacggcccagcgggctgctgctcaggttctgggaagttctggattgtttaataaccatggactccaagtacagcagcaacagcaaaggaatctctcactacatgaatacatgagtatggaattattgcaagaagctggtgtctccgttcccaaaggatatgtggcaaagtcaccagatgaagcttatgcaattgccaaaaaattaggttcaaaagatgtcgtgataaaggcacaggttttagctggtggtagaggaaaaggaacatttgaaagtggcctcaaaggaggagtgaagatagttttctctccagaagaagcaaaagctgtttcttcacaaatgattgggaaaaaattgtttaccaagcaaacgggagaaaagggcagaatatgcaatcaagtattggtctgtgagcgaaaatatcccaggagagaatactactttgcaataacaatggaaaggtcatttcaaggtcctgtattaataggaagttcacatggtggtgtcaacattgaagatgttgctgctgagtctcctgaagcaataattaaagaacctattgatattgaagaaggcatcaaaaaggaacaagctctccagcttgcacagaagatgggatttccacctaatattgtggaatcagcagcagaaaacatggtcaagctttacagcctttttctgaaatacgatgcaaccatgatagaaataaatccaatggtggaagattcagatggagctgtattgtgtatggatgcaaagatcaattttgactctaattcagcctatcgccaaaagaaaatctttgatctacaggactggacccaggaagatgaaagggacaaagatgctgctaaggcaaatctcaactacattggcctcgatggaaatataggctgcctagtaaatggtgctggtttggctatggccacaatggatataataaaacttcatggagggactccagccaacttccttgatgttggtggtggtgctacagtccatcaagtaacagaagcatttaagcttatcacttcagataaaaaggtactggctattctggtcaacatttttggaggaatcatgcgctgtgatgttattgcacagggtatagtcatggcagtaaaagacttggaaattaaaatacctgttgtggtacggttacaaggtacacgagtcgatgatgctaaggcactgatagcggacagtggacttaaaatacttgcttgtgatgacttggatgaagctgctagaatggttgtaaagctctctgaaatagtgaccttagcgaagcaagcacatgtggatgtgaaatttcagttgccaatatgatctgaaaacccagtggatggctgaaggtgttaaatgtgctataatcattaagaatactgtgttctgtgttattgttctttttctttttagtgtgtggagattgtaattgccatctaggcacacaaacatttaaaaggatttggactgcatttaattgtaccattcagaatggactgtttgtacgaagcatgtataatgcagttatcttctttcttttgtcgcagccagtcttttttgcttctcctacaaaacgtaacttgcaatttgccagtttattattgttggatacaaagttcttcattgataagagtcctataaataagataaatacgaagataaagctttattctttagtgttaaaatacagtatatctaataactagcctcattagtagagcagtatattaaaacaatgttttatgtaaaaagtgtttatcttcagcaccaaatacatgataaatgtatcaatcactatttataaacagagctttcaaacactcctcagaatattcttctaagtattttgatgaagtaactttgtaattatttgaacattgttttaatcattaggaaacactgattaactgcaagtcttcatgattctgtcatattaagaaacacctgtaggtttgcttcaaataaaggcatatataccaaggacttacagacaaaattaagaatgtcaatttaagttaataaaaatctcccaatatga

SEQ ID NO: 7114 - protein, 463 aa, Homo sapiens; identical to SEQ ID NO: 972

SEQ ID NO: 7115 - DNA, 1473 bp, Homo sapiens
cgcggcgccgaggggacggggtccgactcagaaatggcggcctccatgttctacggcaggctagtggccgtggccacccttcggaaccaccggcctcggacggcccagcgggctgctgctcaggttctgggaagttctggattgtttaataaccatggactccaagtacagcagcaacagcaaaggaatctctcactacatgaatacatgagtatggaattattgcaagaagctggtgtctccgttcccaaaggatatgtggcaaagtcaccagatgaagcttatgcaattgccaaaaaattaggttcaaaagatgtcgtgataaaggcacaggttttagctggtggtagaggaaaaggaacatttgaaagtggcctcaaaggaggagtgaagatagttttctctccagaagaagcaaaagctgtttcttcacaaatgattgggaaaaaattgtttaccaagcaaacgggagaaaagggcagaatatgcaatcaagtattggtctgtgagcgaaaatatcccaggagagaatactactttgcaataacaatggaaaggtcatttcaagtgagtaattgtagacatgatacatacgggataaatttatgacattcaatttcaaaagtccattattgtttctatttatgtgggaaagattttaaaagtacaaattataatctgtttgtatgtcatgagcatgatatttatgtcatttaaaaaacagcttctttaatgccgtaaaatttgatatataatatcatgatcttaaaattataggaaaaattctgctgtaataaatttcatgggattctcaaattgttaattcactaaaagcagcttaaatcatctctggatcatctccagattgagaaaattatatctagcatagtaaaatattctaatgaaagagaaagttgctgaacccactagaagaatgtgtatccattgcctcatcttctgttttctcaacttcttgggtttgtttttttttttttaatagtttcgggtttgtttcactatatgattcaatatttggtaaattgagggatgacattaagtagcaaacaatatggttttaaggagtattacattagcacagctctcctctctttatggaacctaaaatgttgaacataaagcttctggtgaagagaaaatccctttatagacctggtgtttggaagagagcattgataatcattttatactagaattatctgtttttcgagggtattaggttttacaagctgaatctgtgtgttaactagcttgttttttgaagcaactgggtatatatttgaaagccccagtacggatttcatgtagaacattaattgtgtagaatttagagtaacaaaaattttaagagtcatgaaaataattttcttatgtagaacaacttttttaaaaataacaactttctgtattgtgatttttcttatttacaattaaatctattaatgtttgaatgat

SEQ ID NO: 7116 - protein, 191 aa, Homo sapiens
MAASMFYGRLVAVATLRNHRPRTAQRAAAQVLGSSGLFNNHGLQVQQQQQRNLSLHEYMSMELLQEAGVSVPKGYVAKSPDEAYAIAKKLGSKDVVIKAQVLAGGRGKGTFESGLKGGVKIVFSPEEAKAVSSQMIGKKLFTKQTGEKGRICNQVLVCERKYPRREYYFAITMERSFQVSNCRHDTYGINL

SEQ ID NO: 7117 - DNA, 620 bp, Homo sapiens
ggggcctcgggttaacactgcagccgctagaccagctccctggcgggcgcggagcaagctttgacctttggaactgggcaccgcagccccaatatctgccctgcggtcagagcaacctgaacacttcctagtgaattgcaatgtaaaggtgaccagcgccgccacttgggtgatcttaacttctctcagcctcagttgcctcatctgtaaaatgtgtttcattcaagaaatgattacccagtgtctacttcgtgctaaacagccttgagcccttggcctacagcaatgaataaaaccatttgtgatgctcaaagagaagatggtcggtgtaacgcgcttgtgatgctcaaagagaagatggtcggtgtcatgcgcttctgatgctcaaagagatcggtgtcacgcgcatccgtgtgaagacaccgccaaacaggggacagaatctctctatgttgcccaggctggtctccaactcgtgggttcaagcgatcctcctgcctcagtctcccaaagtgctgggatgacaggtgtgggcaaccacacccagccaaggatctggtttttgaaaagataaataaatttaacaaacctccagcaagactgcaaagaaaaaagaaaaa

SEQ ID NO: 7118 - protein, 47 aa, Homo sapiens
MLKEIGVTRIRVKTPPNRGQNLSMLPRLVSNSWVQAILLPQSPKVLG

SEQ ID NO: 7119 - DNA, 603 bp, Homo sapiens
cacggaagcaagcacggcgtgagttcgtccctctgcgcacgccccggtttcctcgcgtccgcggctgctcacccgaactccagatgacctccagggagttggaaactgccagctccaaccgagcctttcctcttccccaggaggacgcaacgcggatgcttgcagctggtcaccacgactccgactccgactcctggccgccgcccgcgcggctgtgcgctggccgtcatagcgcgcgggaggacgcgcctggcagcggcaggaagtgacgcgctcactaccccgtcccgcggccgcagccaatctctccccgcgagggcggaggcgccgaaatcaaagcgagagcgcctcggcctctccagctgtccgcgtcttgctggaggtttgttaaatttatttatcttttcaaaaaccagatccttggctgggtgtggttgcccacacctgtcatcccagcactttgggagactgaggcaggaggatcgcttgaacccacgagttggagaccagcctgggcaacatagagagattctgtccctaaaaaaataaaataaaaaaatcaaccaagcctggtgacacacatctgtggtcccaaactactcc

SEQ ID NO: 7120 - protein, 61 aa, Homo sapiens
MTSRELETASSNRAFPLPQEDATRMLAAGHHDSDSDSWPPPARLCAGRHSAREDAPGSGRK

SEQ ID NO: 7121 - DNA, 735 bp, Homo sapiens
cacggaagcaagcacggcgtgagttcgtccctctgcgcacgccccggtttcctcgcgtccgcggctgctcacccgaactccagatgacctccagggagttggaaactgccagctccaaccgagcctttcctcttccccaggaggacgcaacgcggatgcttgcagctggtcaccacgactccgactccgactcctggccgccgcccgcgcggctgtgcgctggccgtcatagcgcgcgggaggacgcgcctggcagcggcaggaagtgacgcgctcactaccccgtcccgcggccgcagccaatctctccccgcgagggcggaggcgccgaaatcaaagcgagagcgcctcggcctctccagctgtccgcggcctctgagcccaagtctgcacgtattcatccagatggcctgaagtaactgaagattcacaaaagaagtgaaaatggcctgttcctgccttaactgatgacattccaccattgtgatttgttcctgccccaccttaactgagcgattaaccttgtgaaattccttctcctggctcagaacctcccccactgagcaccttgtgacccccaccccagcctgccagagaacaacaccctttgactgtaattttgctttacctacccaaatcctataaaacggccccacccctatttccctttgctgactctcttttccgactcagcccgcctgcacccaggtgattaaaaagctttattgctcacac

SEQ ID NO: 7122 - protein, 61 aa, Homo sapiens; identical to SEQ ID NO: 7120

SEQ ID NO: 7123 - DNA, 2098 bp, Homo sapiens
attccccaacctgatagccctccgcgacgcattacgcaccgcggacagctggagaggccgaggcgctctcgctttgatttcggcgcctccgccctcgcggggagagattggctgcggccgcgggacggggtagtgagcgcgtcacttcctgccgctgccaggcgcgtcctcccgcgcgctatgacggccagcgcacagccgcgcgggcggcggccaggagtcggagtcggagtcgtggtgaccagctgcaagcatccgcgttgcgtcctcctggggaagaggaaaggctcggttggagctggcagtttccaactccctggaggtcatctggagttcggtgaaacctgggaagaatgtgctcaaagggaaacctgggaagaagcagctcttcacctgaaaaatgttcactttgcctcagttgtgaattctttcattgagaaggagaattaccattatgttactatattaatgaaaggagaagtggatgtgactcatgattcagaaccaaagaatgtagagcctgaaaaaaatgaaagttgggagtgggttccttgggaagaactacctcccctggaccagcttttctggggactgcgttgtttaaaagaacaaggctatgatccatttaaagaagatctgaaccatctggtgggatacaaaggaaatcatctctaggtggccgagaagatttgattttctttaaaaagacaagaataaggtctggttagggaatgaaaaatgtatacatttcggaacaactccattttatctaaaaaagttcttgtgattgccagtttatttgcagtctcttaatgtatcccccactctttcagccagtacttgagaaaatttttctgaaatatgtcattgaattgtattccagacacagaatacatgataaatactgatattatgggtaatctgctttccatatttacctatgatatttactgtgcagtttgtcattactagcttgcatggagtaggatgcagtcaaatttgccttagtgtttctgttcaaatagagacctgaattcaaatattgtagtttaggttcaaacagagtatggctgttgcaaaatttaccaaatttgttgattacctcttttattaaagaaatgttggggagagggtaatatattgtgacaatttttgcaacttacagggaataggacaggtcattagggtgtatttcccaggtttccaattgagaatctaaaccaagagaagtgagacaaaccatctaatatctgtatcatgctattaataggctgtgatgttgagtttctcacttactctttctgaggtccagggtccttatatgaagagattcatatatatgaagagattcgtctagagcagtggttgtcaaagtgtggtctgggggggcctcaagagcctttcaagggtattctaggtcaaagctgtttttataacactaagacatcatttcactatttatagcttttccttttttttatttgagaaggagtcttgctctgttgcccacattggagtgcagtggcacgatctcagctcattgcagcctccgccacctgggttcaagcaattctcctacctcagcttcccgagtagctgggattataggcacccaccaccacacctggctaatttttgtatttttagtggagacggggtttcaccatgttggccaggctggtctggaactcctgagctcaagtgatctgcccatctcagcctcccaaagtgctgggattacaggtatgagccacaacgcccagccatcatttatctttttcactcattttttcatgagtatgcagaggagttttcaagaggctatctggtgtgatattgtaataggctgaatgcaaaagcagatacaagattccagctttcgtctgtcatcagacattgaagagatttggagaaatgtaaagcagcagtactcttctcactaatttttgttgtggttagttagaaaaatggttatttttagtgggttttaatatgtgaaaaaaataaaattagctatttgccaaaaatgtttttatgtgtttatatatacttggttcttgttacttgcaaatgattaataaaaattttaagaaatttc

SEQ ID NO: 7124 - protein, 164 aa, Homo sapiens [sequence omitted]

SEQ ID NO: 7125 - DNA, 747 bp, Homo sapiens
cgcgcgctatgacggccagcgcacagccgcgcgggcggcggccaggagtcggagtcggagtcgtggtgaccagctgcaagcatccgcgttgcgtcctcctggggaagaggaaaggctcggttggagctggcagtttccaactccctggaggtcatctggagttcggtgaaacctgggaagaatgtgctcaaagggaaacctgggaagaagcagctcttcacctgaaaaatgttcactttgcctcagttgtgaattctttcattgagaaggagaattaccattatgttactatattaatgaaaggagaagtggatgtgactcatgattcagaaccaaagaatgtagagcctgaaaaaaatgaaagtaagagaattatatataatcatgcatttttctttcaggagagcaagtggtctggaggaatattacagtatgttgccatatgaagagaatgctattgtctgaatgcttgtgttcccccaaaattctatgtagaaatcctaactcccatgacgaggttttaggaggttggggcccttgggaggtgattagatcataagataatgaatgggattcatgcccttataaaagagacccctgaccccttccatgatgtaaagatacagagagaagatcgttgtctgtgaacctggaagtgggccctccccagatatggaatctgccagtgtcttgatcttggacttcccagtctctagaactgttgagaaataaatttctgttgctcat

SEQ ID NO: 7126 - protein, 145 aa, Homo sapiens
MTASAQPRGRRPGVGVGVVVTSCKHPRCVLLGKRKGSVGAGSFQLPGGHLEFGETWEECAQRETWEEAALHLKNVHFASVVNSFIEKENYHYVTILMKGEVDVTHDSEPKNVEPEKNESKRIIYNHAFFFQESKWSGGILQYVAI

SEQ ID NO: 7127 - DNA, 1028 bp, Homo sapiens
ctcgccacgcacctgcgtcagctcgctctgcgcgtgcgccggtggcgggactctggggaaaatggctgcgtcttcgagtggtgagaaggagaaggagcggctgggaggcggtttgggagtggcgggtggtaacagcacacgagagcggctgctgtctgcgcttgaggacttggaggtcctgtctagggaacttatagaaatgctggcaatttcaagaaaccaaaagttgttacaggctggagaggaaaaccaggtcctggagttgttaattcaccgagatggggaatttcaagaactaatgaaattggcacttaatcagggaaaaattcatcatgaaatgcaagttttagaaaaagaagtagagaagagagacagtgatattcagcagctacaaaaacagctaaaggaagcagaacaaatactggcaacagctgtttaccaagcgaaggagaaactcaagtcaatagaaaaagcaagaaaaggtgctatctcctctgaagaaataattaagtatgcacataggatcagtgcaagtaatgctgtatgtgctccactgacctgggttccaggggacccccggagaccctacccaactgatttagagatgagaagtgggttactgggtcagatgaacaatccttccactaatggcgtgaatggccatttaccaggagatgcacttgcagcaggaagattgccagatgtccttgctccacagtatccatggcagtcaaatgacatgtcgatgaatatgttaccaccaaatcatagtagtgactttttgttggaacctcctgggcataataaagaaaatgaagatgatgtagagattatgtcaacggactcctcaagcagtagtaagatggagtttcaccatgttggccagactggttccgaactcctgacctcaagtgatccacccacctcggcctcccaaagtgctgggattacaggtgtgagccaccgcgcctggcaagagccttctttacttagcacagaagattgcttaataaatacttcttggttat

SEQ ID NO: 7128 - protein, 321 aa, Homo sapiens
MAASSSGEKEKERLGGGLGVAGGNSTRERLLSALEDLEVLSRELIEMLAISRNQKLLQAGEENQVLELLIHRDGEFQELMKLALNQGKIHHEMQVLEKEVEKRDSDIQQLQKQLKEAEQILATAVYQAKEKLKSIEKARKGAISSEEIIKYAHRISASNAVCAPLTWVPGDPRRPYPTDLEMRSGLLGQMNNPSTNGVNGHLPGDALAAGRLPDVLAPQYPWQSNDMSMNMLPPNHSSDFLLEPPGHNKENEDDVEIMSTDSSSSSKMEFHHVGQTGSELLTSSDPPTSASQSAGITGVSHRAWQEPSLLSTEDCLINTSW

SEQ ID NO: 7129 - DNA, 2090 bp, Homo sapiens
gccggtggcgggactctggggaaaatggctgcgtcttcgagtggtgagaaggagaaggagcggctgggaggcggtttgggagtggcgggtggtaacagcacacgagagcggctgctgtctgcgcttgaggacttggaggtcctgtctagggaacttatagaaatgctggcaatttcaagaaaccaaaagttgttacaggctggagaggaaaaccaggtcctggagttgttaattcaccgagatggggaatttcaagaactaatgaaattggcacttaatcagggaaaaattcatcatgaaatgcaagttttagaaaaagaagtagagaagagagacaaccctacccaactgatttagagatgagaagtgggttactgggtcagatgaacaatccttccactaatggcgtgaatggccatttaccaggagatgcacttgcagcaggaagattgccagatgtccttgctccacagtatccatggcagtcaaatgacatgtcgatgaatatgttaccaccaaatcatagtagtgactttttgttggaacctcctgggcataataaagaaaatgaagatgatgtagagattatgtcaacggactcctcaagcagtagtagtgagtctgattgaaaaaccttaaaagacaatatacagaattgaatactgtagaattctgtttctttaacagtagcagggaaatgtaaactacaggtgacaaaaaatacccaggtaaacactggctttggtagaattgtgcagtcattaaaagtcaaaattttttgactttctttttaaagccaaagaccatagttttagttttaagccactaggtagatatttaggggaatagtcaaaatttactgttgaaaaagcagttgctatgtgctttcttaccctgttctgttccagttttgctggatttgtacatagccattctagaaatagagttgagggaaattatccatatacatatcactaataggcttcttggaattatttagaaaagcatttttaaactggcagtggatgactgaataggcatcatatttctttttgtgtgtcatttaaaagtaacaaaaactgccatttgacagtaaaggctcttggcttctgttggaggcatgggaaattgtctcaatttgtacagtttgtaattgtaatttttgtaaataaatttgtttgtacattgtatgctttttttttagtttaaatatactgtcagtgtaggtaggaaattatttctgtaaatccagttgcattttataatacttgagtgactaactgaattgaaacctattacaattaatagggttctcaaaggcctattcctattagaagaaataattttttttaataattgaaaaaatttaccacagccttgtctgattttaagaatagattgtgtgaagatttagaatggaaagcaaccatttcttcccttcaccttcctcttcttacagttccccaggagtcatttttaaccacttttaatttctgttggtaacctctgtgtttaggtaatatgcttatacaactatttcttgatgtatcagttttagacaatgtatcttctgatttcaaaggtaatacaacatttaatgtgaaacatttagtgaatacagtaaaggagaaaataaaattgttagcattctacccagagataatatcaattcatattgtagtgtagatttttttaaagttcacatacacttttttgtaaaatgagaataatgtttatttcctgagatactgctgtattttttaattgctaatctgtattcttcaaatgaactgagaattccatttttccatcattttttccttttgattattttcgatctctagaaaaattggaaaataggagattaatcttatattttcaccatctagaattaaggacatacaatgtttgaatgtctttccctccagggttatttttaggaatggactaacacaatatctaattttaaccttgccttgtccgtatactaggaatattgatccatgtgtatacattcttgaaagatttactttaatggctaaaattttattgtggtatgtgccataatgtaactgcctgtttttatcacc

SEQ ID NO: 7130 - protein, 110 aa, Homo sapiens [sequence omitted]

SEQ ID NO: 7131 - DNA, 2194 bp, Homo sapiens
gcgccggtggcgggactctggggaaaatggctgcgtcttcgagtgggaacttatagaaatgctggcaatttcaagaaaccaaaagttgttacaggctggagaggaaaaccaggtcctggagttgttaattcaccgagatggggaatttcaagaactaatgaaattggcacttaatcagggaaaaattcatcatgaaatgcaagttttagaaaaagaagtagagaagagagacagtgatattcagcagctacaaaaacagctaaaggaagcagaacaaatactggcaacagctgtttaccaagcgaaggagaaactcaagtcaatagaaaaagcaagaaaaggtgctatctcctctgaagaaataattaagtatgcacataggatcagtgcaagtaatgctgtatgtgctccactgacctgggttccaggggacccccggagaccctacccaactgatttagagatgagaagtgggttactgggtcagatgaacaatccttccactaatggcgtgaatggccatttaccaggagatgcacttgcagcaggaagattgccagatgtccttgctccacagtatccatggcagtcaaatgacatgtcgatgaatatgttaccaccaaatcatagtagtgactttttgttggaacctcctgggcataataaagaaaatgaagatgatgtagagattatgtcaacggactcctcaagcagtagtagtgagtctgattgaaaaaccttaaaagacaatatacagaattgaatactgtagaattctgtttctttaacagtagcagggaaatgtaaactacaggtgacaaaaaatacccaggtaaacactggctttggtagaattgtgcagtcattaaaagtcaaaattttttgactttctttttaaagccaaagaccatagttttagttttaagccactaggtagatatttaggggaatagtcaaaatttactgttgaaaaagcagttgctatgtgctttcttaccctgttctgttccagttttgctggatttgtacatagccattctagaaatagagttgagggaaattatccatatacatatcactaataggcttcttggaattatttagaaaagcatttttaaactggcagtggatgactgaataggcatcatatttctttttgtgtgtcatttaaaagtaacaaaaactgccatttgacagtaaaggctcttggcttctgttggaggcatgggaaattgtctcaatttgtacagtttgtaattgtaatttttgtaaataaatttgtttgtacattgtatgctttttttttagtttaaatatactgtcagtgtaggtaggaaattatttctgtaaatccagttgcattttataatacttgagtgactaactgaattgaaacctattacaattaatagggttctcaaaggcctattcctattagaagaaataattttttttaataattgaaaaaatttaccacagccttgtctgattttaagaatagattgtgtgaagatttagaatggaaagcaaccatttcttcccttcaccttcctcttcttacagttccccaggagtcatttttaaccacttttaatttctgttggtaacctctgtgtttaggtaatatgcttatacaactatttcttgatgtatcagttttagacaatgtatcttctgatttcaaaggtaatacaacatttaatgtgaaacatttagtgaatacagtaaaggagaaaataaaattgttagcattctacccagagataatatcaattcatattgtagtgtagatttttttaaagttcacatacacttttttgtaaaatgagaataatgtttatttcctgagatactgctgtattttttaattgctaatctgtattcttcaaatgaactgagaattccatttttccatcattttttccttttgattattttcgatctctagaaaaattggaaaataggagattaatcttatattttcaccatctagaattaaggacatacaatgtttgaatgtctttccctccagggttatttttaggaatggactaacacaatatctaattttaaccttgccttgtccgtatactaggaatattgatccatgtgtatacattcttgaaagatttactttaatggctaaaattttattgtggtatgtgccataatgtaactgcctgtttttatcacc

SEQ ID NO: 7132 - protein, 224 aa, Homo sapiens
MLAISRNQKLLQAGEENQVLELLIHRDGEFQELMKLALNQGKIHHEMQVLEKEVEKRDSDIQQLQKQLKEAEQILATAVYQAKEKLKSIEKARKGAISSEEIIKYAHRISASNAVCAPLTWVPGDPRRPYPTDLEMRSGLLGQMNNPSTNGVNGHLPGDALAAGRLPDVLAPQYPWQSNDMSMNMLPPNHSSDFLLEPPGHNKENEDDVEIMSTDSSSSSSESD

SEQ ID NO: 7133 - DNA, 2332 bp, Homo sapiens
gccacgcacctgcgtcagctcgctctgcgcgtgcgccggtggcgggactctggggaaaatggctgcgtcttcgagtggtgagaaggagaaggagcggctgggaggcggtttgggagtggcgggtggtaacagcacacgagagcggctgctgtctgcgcttgaggacttggaggtcctgtctagggaacttatagaaatgctggcaatttcaagaaaccaaaagttgttacaggctggagaggaaaaccaggtcctggagttgttaattcaccgagatggggaatttcaagaactaatgaaattggcacttaatcagggaaaaattcatcatgaaatgcaagttttagaaaaagaagtagagaagagagacagtgatattcagcagctacaaaaacagctaaaggaagcagaacaaatactggcaacagctgtttaccaagcgaaggagaaactcaagtcaatagaaaaagcaagaaaaggtgctatctcctctgaagaaataattaagtatgcacataggatcagtgcaagtaatgctgtatgtgctccactgacctgggttccaggggacccccggagaccctacccaactgatttagagatgagaagtgggttactgggtcagatgaacaatccttccactaatggcgtgaatggccatttaccaggagatgcacttgcagcaggaagattgccagatgtccttgctccacagtatccatggcagtcaaatgacatgtcgatgaatatgttaccaccaaatcatagtagtgactttttgttggaacctcctgggcataataaagaaaatgaagatgatgtagagattatgtcaacggactcctcaagcagtagtagtgagtctgattgaaaaaccttaaaagacaatatacagaattgaatactgtagaattctgtttctttaacagtagcagggaaatgtaaactacaggtgacaaaaaatacccaggtaaacactggctttggtagaattgtgcagtcattaaaagtcaaaattttttgactttctttttaaagccaaagaccatagttttagttttaagccactaggtagatatttaggggaatagtcaaaatttactgttgaaaaagcagttgctatgtgctttcttaccctgttctgttccagttttgctggatttgtacatagccattctagaaatagagttgagggaaattatccatatacatatcactaataggcttcttggaattatttagaaaagcatttttaaactggcagtggatgactgaataggcatcatatttctttttgtgtgtcatttaaaagtaacaaaaactgccatttgacagtaaaggctcttggcttctgttggaggcatgggaaattgtctcaatttgtacagtttgtaattgtaatttttgtaaataaatttgtttgtacattgtatgctttttttttagtttaaatatactgtcagtgtaggtaggaaattatttctgtaaatccagttgcattttataatacttgagtgactaactgaattgaaacctattacaattaatagggttctcaaaggcctattcctattagaagaaataattttttttaataattgaaaaaatttaccacagccttgtctgattttaagaatagattgtgtgaagatttagaatggaaagcaaccatttcttcccttcaccttcctcttcttacagttccccaggagtcatttttaaccacttttaatttctgttggtaacctctgtgtttaggtaatatgcttatacaactatttcttgatgtatcagttttagacaatgtatcttctgatttcaaaggtaatacaacatttaatgtgaaacatttagtgaatacagtaaaggagaaaataaaattgttagcattctacccagagataatatcaattcatattgtagtgtagatttttttaaagttcacatacacttttttgtaaaatgagaataatgtttatttcctgagatactgctgtattttttaattgctaatctgtattcttcaaatgaactgagaattccatttttccatcattttttccttttgattattttcgatctctagaaaaattggaaaataggagattaatcttatattttcaccatctagaattaaggacatacaatgtttgaatgtctttccctccagggttatttttaggaatggactaacacaatatctaattttaaccttgccttgtccgtatactaggaatattgatccatgtgtatacattcttgaaagatttactttaatggctaaaattttattgtggtatgtgccataatgtaactgcctgtttttatcacc

SEQ ID NO: 7134 - protein, 270 aa, Homo sapiens; identical to SEQ ID NO: 976

SEQ ID NO: 7135 - DNA, 1667 bp, Homo sapiens
gccggtggcgggactctggggaaaatggctgcgtcttcgagtggtgagaaggagaaggagcggctgggaggcggtttgggagtggcgggtggtaacagcacacgagagcggctgctgtctgcgcttgaggacttggaggtcctgtctagggaacttatagaaatgctggcaatttcaagaaaccaaaagttgttacaggctggagaggaaaaccaggtcctggagttgttaattcaccgagatggggaatttcaagaactaatgaaattggcacttaatcagggaaaaattcatcatgaaatgcaagttttagaaaaagaagtagagaagagagacaaccctacccaactgatttagagatgagaagtgggttactgggtcagatgaacaatccttccactaatggcgtgaatggccatttaccaggagatgcacttgcagcaggaagattgccagatgtccttgctccacagtatccatggcagtcaaatgacatgtcgatgaatatgttaccaccaaatcatagtagtgactttttgttggaacctcctgggcataataaagaaaatgaagatgatgtagagattatgtcaacggactcctcaagcagtagtagtgagtctgattgaaaaaccttaaaagacaatatacagaattgaatactgtagaattctgtttctttaacagtagcagggaaatgtaaactacaggtgacaaaaaatacccaggtaaacactggctttggtagaattgtgcagtcattaaaagtcaaaattttttgactttctttttaaagccaaagaccatagttttagttttaagccactaggtagatatttaggggaatagtcaaaatttactgttgaaaaagcagttgctatgtgctttcttaccctgttctgttccagttttgctggatttgtacatagccattctagaaatagagttgagggaaattatccatatacatatcactaataggcttcttggaattatttagaaaagcatttttaaactggcagtggatgactgaataggcatcatatttctttttgtgtgtcatttaaaagtaacaaaaactgccatttgacagtaaaggctcttggcttctgttggaggcatgggaaattgtctcaatttgtacagtttgtaattgtaatttttgtaaataaatttgtttgtacattgtatgctttttttttagtttaaatatactgtcagtgtaggtaggaaattatttctgtaaatccagttgcattttataatacttgagtgactaactgaattgaaacctattacaattaatagggttctcaaaggcctattcctattagaagaaataattttttttaataattgaaaaaatttaccacagccttgtctgattttaagaatagattgtgtgaagatttagaatggaaagcaaccatttcttcccttcaccttcctcttcttacagttccccaggagtcatttttaaccacttttaatttctgttggtaacctctgtgtttaggtaatatgcttatacaactatttcttgatgtatcagttttagacaatgtatcttctgatttcaaaggtaatacaacatttaatgtgaaacatttagtgaatacagtaaaggagaaaataaaattgttagcattctacccagagataatatc

SEQ ID NO: 7136 - protein, 110 aa, Homo sapiens [sequence omitted]

SEQ ID NO: 7137 - DNA, 1771 bp, Homo sapiens
gcgccggtggcgggactctggggaaaatggctgcgtcttcgagtgggaacttatagaaatgctggcaatttcaagaaaccaaaagttgttacaggctggagaggaaaaccaggtcctggagttgttaattcaccgagatggggaatttcaagaactaatgaaattggcacttaatcagggaaaaattcatcatgaaatgcaagttttagaaaaagaagtagagaagagagacagtgatattcagcagctacaaaaacagctaaaggaagcagaacaaatactggcaacagctgtttaccaagcgaaggagaaactcaagtcaatagaaaaagcaagaaaaggtgctatctcctctgaagaaataattaagtatgcacataggatcagtgcaagtaatgctgtatgtgctccactgacctgggttccaggggacccccggagaccctacccaactgatttagagatgagaagtgggttactgggtcagatgaacaatccttccactaatggcgtgaatggccatttaccaggagatgcacttgcagcaggaagattgccagatgtccttgctccacagtatccatggcagtcaaatgacatgtcgatgaatatgttaccaccaaatcatagtagtgactttttgttggaacctcctgggcataataaagaaaatgaagatgatgtagagattatgtcaacggactcctcaagcagtagtagtgagtctgattgaaaaaccttaaaagacaatatacagaattgaatactgtagaattctgtttctttaacagtagcagggaaatgtaaactacaggtgacaaaaaatacccaggtaaacactggctttggtagaattgtgcagtcattaaaagtcaaaattttttgactttctttttaaagccaaagaccatagttttagttttaagccactaggtagatatttaggggaatagtcaaaatttactgttgaaaaagcagttgctatgtgctttcttaccctgttctgttccagttttgctggatttgtacatagccattctagaaatagagttgagggaaattatccatatacatatcactaataggcttcttggaattatttagaaaagcatttttaaactggcagtggatgactgaataggcatcatatttctttttgtgtgtcatttaaaagtaacaaaaactgccatttgacagtaaaggctcttggcttctgttggaggcatgggaaattgtctcaatttgtacagtttgtaattgtaatttttgtaaataaatttgtttgtacattgtatgctttttttttagtttaaatatactgtcagtgtaggtaggaaattatttctgtaaatccagttgcattttataatacttgagtgactaactgaattgaaacctattacaattaatagggttctcaaaggcctattcctattagaagaaataattttttttaataattgaaaaaatttaccacagccttgtctgattttaagaatagattgtgtgaagatttagaatggaaagcaaccatttcttcccttcaccttcctcttcttacagttccccaggagtcatttttaaccacttttaatttctgttggtaacctctgtgtttaggtaatatgcttatacaactatttcttgatgtatcagttttagacaatgtatcttctgatttcaaaggtaatacaacatttaatgtgaaacatttagtgaatacagtaaaggagaaaataaaattgttagcattctacccagagataatatc

SEQ ID NO: 7138 - protein, 224 aa, Homo sapiens; identical to SEQ ID NO: 7132

SEQ ID NO: 7139 - DNA, 1909 bp, Homo sapiens
gccacgcacctgcgtcagctcgctctgcgcgtgcgccggtggcgggactctggggaaaatggctgcgtcttcgagtggtgagaaggagaaggagcggctgggaggcggtttgggagtggcgggtggtaacagcacacgagagcggctgctgtctgcgcttgaggacttggaggtcctgtctagggaacttatagaaatgctggcaatttcaagaaaccaaaagttgttacaggctggagaggaaaaccaggtcctggagttgttaattcaccgagatggggaatttcaagaactaatgaaattggcacttaatcagggaaaaattcatcatgaaatgcaagttttagaaaaagaagtagagaagagagacagtgatattcagcagctacaaaaacagctaaaggaagcagaacaaatactggcaacagctgtttaccaagcgaaggagaaactcaagtcaatagaaaaagcaagaaaaggtgctatctcctctgaagaaataattaagtatgcacataggatcagtgcaagtaatgctgtatgtgctccactgacctgggttccaggggacccccggagaccctacccaactgatttagagatgagaagtgggttactgggtcagatgaacaatccttccactaatggcgtgaatggccatttaccaggagatgcacttgcagcaggaagattgccagatgtccttgctccacagtatccatggcagtcaaatgacatgtcgatgaatatgttaccaccaaatcatagtagtgactttttgttggaacctcctgggcataataaagaaaatgaagatgatgtagagattatgtcaacggactcctcaagcagtagtagtgagtctgattgaaaaaccttaaaagacaatatacagaattgaatactgtagaattctgtttctttaacagtagcagggaaatgtaaactacaggtgacaaaaaatacccaggtaaacactggctttggtagaattgtgcagtcattaaaagtcaaaattttttgactttctttttaaagccaaagaccatagttttagttttaagccactaggtagatatttaggggaatagtcaaaatttactgttgaaaaagcagttgctatgtgctttcttaccctgttctgttccagttttgctggatttgtacatagccattctagaaatagagttgagggaaattatccatatacatatcactaataggcttcttggaattatttagaaaagcatttttaaactggcagtggatgactgaataggcatcatatttctttttgtgtgtcatttaaaagtaacaaaaactgccatttgacagtaaaggctcttggcttctgttggaggcatgggaaattgtctcaatttgtacagtttgtaattgtaatttttgtaaataaatttgtttgtacattgtatgctttttttttagtttaaatatactgtcagtgtaggtaggaaattatttctgtaaatccagttgcattttataatacttgagtgactaactgaattgaaacctattacaattaatagggttctcaaaggcctattcctattagaagaaataattttttttaataattgaaaaaatttaccacagccttgtctgattttaagaatagattgtgtgaagatttagaatggaaagcaaccatttcttcccttcaccttcctcttcttacagttccccaggagtcatttttaaccacttttaatttctgttggtaacctctgtgtttaggtaatatgcttatacaactatttcttgatgtatcagttttagacaatgtatcttctgatttcaaaggtaatacaacatttaatgtgaaacatttagtgaatacagtaaaggagaaaataaaattgttagcattctacccagagataatatc

SEQ ID NO: 7140 - protein, 270 aa, Homo sapiens; identical to SEQ ID NO: 976

SEQ ID NO: 7141 - DNA, 1437 bp, Homo sapiens
gccacgcacctgcgtcagctcgctctgcgcgtgcgccggtggcgggactctggggaaaatggctgcgtcttcgagtggtgagaaggagaaggagcggctgggaggcggtttgggagtggcgggtggtaacagcacacgagagcggctgctgtctgcgcttgaggacttggaggtcctgtctagggaacttatagaaatgctggcaatttcaagaaaccaaaagttgttacaggctggagaggaaaaccaggtcctggagttgttaattcaccgagatggggaatttcaagaactaatgaaattggcacttaatcagggaaaaattcatcatgaaatgcaagttttagaaaaagaagtagagaagagagacagtgatattcagcagctacaaaaacagctaaaggaagcagaacaaatactggcaacagctgtttaccaagcgaaggagaaactcaagtcaatagaaaaagcaagaaaaggtgctatctcctctgaagaaataattaagtatgcacataggatcagtgcaagtaatgctgtatgtgctccactgacctgggttccaggggacccccggagaccctacccaactgatttagagatgagaagtgggttactgggtcagatgaacaatccttccactaatggcgtgaatggccatttaccaggagatgcacttgcagcaggaagattgccagatgtccttgctccacagtatccatggcagtcaaatgacatgtcgatgaatatgttaccaccaaatcatagtagtgactttttgttggaacctcctgggcataataaagaaaatgaagatgatgtagagattatgtcaacggactcctcaagcagtagtagtgagtctgattgaaaaaccttaaaagacaatatacagaattgaatactgtagaattctgtttctttaacagtagcagggaaatgtaaactacaggtgacaaaaaatacccaggtaaacactggctttggtagaattgtgcagtcattaaaagtcaaaattttttgactttctttttaaagccaaagaccatagttttagttttaagccactaggtagatatttaggggaatagtcaaaatttactgttgaaaaagcagttgctatgtgctttcttaccctgttctgttccagttttgctggatttgtacatagccattctagaaatagagttgagggaaattatccatatacatatcactaataggcttcttggaattatttagaaaagcatttttaaactggcagtggatgactgaataggcatcatatttctttttgtgtgtcatttaaaagtaacaaaaactgccatttgacagtaaaggctcttggcttctgttggaggcatgggaaattgtctcaatttgtacagtttgtaattgtaatttttgtaaataaatttgtttgtacattgtatgctt

SEQ ID NO: 7142 - protein, 270 aa, Homo sapiens; identical to SEQ ID NO: 976

SEQ ID NO: 7143 - DNA, 1195 bp, Homo sapiens
gccggtggcgggactctggggaaaatggctgcgtcttcgagtggtgagaaggagaaggagcggctgggaggcggtttgggagtggcgggtggtaacagcacacgagagcggctgctgtctgcgcttgaggacttggaggtcctgtctagggaacttatagaaatgctggcaatttcaagaaaccaaaagttgttacaggctggagaggaaaaccaggtcctggagttgttaattcaccgagatggggaatttcaagaactaatgaaattggcacttaatcagggaaaaattcatcatgaaatgcaagttttagaaaaagaagtagagaagagagacaaccctacccaactgatttagagatgagaagtgggttactgggtcagatgaacaatccttccactaatggcgtgaatggccatttaccaggagatgcacttgcagcaggaagattgccagatgtccttgctccacagtatccatggcagtcaaatgacatgtcgatgaatatgttaccaccaaatcatagtagtgactttttgttggaacctcctgggcataataaagaaaatgaagatgatgtagagattatgtcaacggactcctcaagcagtagtagtgagtctgattgaaaaaccttaaaagacaatatacagaattgaatactgtagaattctgtttctttaacagtagcagggaaatgtaaactacaggtgacaaaaaatacccaggtaaacactggctttggtagaattgtgcagtcattaaaagtcaaaattttttgactttctttttaaagccaaagaccatagttttagttttaagccactaggtagatatttaggggaatagtcaaaatttactgttgaaaaagcagttgctatgtgctttcttaccctgttctgttccagttttgctggatttgtacatagccattctagaaatagagttgagggaaattatccatatacatatcactaataggcttcttggaattatttagaaaagcatttttaaactggcagtggatgactgaataggcatcatatttctttttgtgtgtcatttaaaagtaacaaaaactgccatttgacagtaaaggctcttggcttctgttggaggcatgggaaattgtctcaatttgtacagtttgtaattgtaatttttgtaaataaatttgtttgtacattgtatgctt

SEQ ID NO: 7144 - protein, 110 aa, Homo sapiens [sequence omitted]

SEQ ID NO: 7145 - DNA, 1299 bp, Homo sapiens
gcgccggtggcgggactctggggaaaatggctgcgtcttcgagtgggaacttatagaaatgctggcaatttcaagaaaccaaaagttgttacaggctggagaggaaaaccaggtcctggagttgttaattcaccgagatggggaatttcaagaactaatgaaattggcacttaatcagggaaaaattcatcatgaaatgcaagttttagaaaaagaagtagagaagagagacagtgatattcagcagctacaaaaacagctaaaggaagcagaacaaatactggcaacagctgtttaccaagcgaaggagaaactcaagtcaatagaaaaagcaagaaaaggtgctatctcctctgaagaaataattaagtatgcacataggatcagtgcaagtaatgctgtatgtgctccactgacctgggttccaggggacccccggagaccctacccaactgatttagagatgagaagtgggttactgggtcagatgaacaatccttccactaatggcgtgaatggccatttaccaggagatgcacttgcagcaggaagattgccagatgtccttgctccacagtatccatggcagtcaaatgacatgtcgatgaatatgttaccaccaaatcatagtagtgactttttgttggaacctcctgggcataataaagaaaatgaagatgatgtagagattatgtcaacggactcctcaagcagtagtagtgagtctgattgaaaaaccttaaaagacaatatacagaattgaatactgtagaattctgtttctttaacagtagcagggaaatgtaaactacaggtgacaaaaaatacccaggtaaacactggctttggtagaattgtgcagtcattaaaagtcaaaattttttgactttctttttaaagccaaagaccatagttttagttttaagccactaggtagatatttaggggaatagtcaaaatttactgttgaaaaagcagttgctatgtgctttcttaccctgttctgttccagttttgctggatttgtacatagccattctagaaatagagttgagggaaattatccatatacatatcactaataggcttcttggaattatttagaaaagcatttttaaactggcagtggatgactgaataggcatcatatttctttttgtgtgtcatttaaaagtaacaaaaactgccatttgacagtaaaggctcttggcttctgttggaggcatgggaaattgtctcaatttgtacagtttgtaattgtaatttttgtaaataaatttgtttgtacattgtatgctt

SEQ ID NO: 7146 - protein, 224 aa, Homo sapiens; identical to SEQ ID NO: 7132

SEQ ID NO: 7147 - DNA, 544 bp, Homo sapiens
tttcaatcagactcactactactgcttgaggagtccgttgacataatctctacatcatcttcattttctttattatgcccaggaggttccaacaaaaagtcactactatgatttggtggtaacatattcatcgacatgtcatttgactgccatggatactgtggagcaaggacatctggagaaaaaaagaagcatagataagaacagctctatctggtctcattctgtcacccaggcttgagtgcagtggcacgaatacatcactgaagccctgacctaggctcaagcaatcctcctgcctcagcctcctgagtaactgggttacagatattccaaccttgtcatctctggaaaaccctgatctgtttgaaaacactcttcggcttaacattacctggcaatcttcctgctgcaagtgcatctcctggtaaatggccattcacgccattagtggaaggattgttcatctgacccagtaacccacttctcatctctaaatcagttgggtagggtctccgggggtcccctaaaacaataaagactg

SEQ ID NO: 7148 - protein, 52 aa, Homo sapiens
VTGLQIFQPCHLWKTLICLKTLFGLTLPGNLPAASASPGKWPFTPLVEGLFI

SEQ ID NO: 7149 - DNA, 521 bp, Homo sapiens
gccggtggcgggactctggggaaaatggctgcgtcttcgagtggtgagaaggagaaggagcggctgggaggcggtttgggagtggcgggtggtaacagcacacgagagcggctgctgtctgcgcttgaggacttggaggtcctgtctaggtcctggagttgttaattcaccgagatggggaatttcaagaactaatgaaattggcacttaatcagggaaaaattcatcatgaaatgcaagttttagaaaaagaagtagagaagagagacagtgatattcagcagctacaaaaacagctaaaggaagcagaacaaatactggtgctatctcctctgaagaaataattaagtatgcacataggatcagtgcaagtaatgctgtatgtgctccactgacctgggttccagtagagacggggtttcaccatgctggccaggctggtcttgaacttctgacttgaggtgatccacccacctcgtcctcctaaagtgctgggattacaggcgtgagccactgcacct

SEQ ID NO: 7150 - protein, 49 aa, Homo sapiens
MKLALNQGKIHHEMQVLEKEVEKRDSDIQQLQKQLKEAEQILVLSPLKK

SEQ ID NO: 7151 - DNA, 1771 bp, Homo sapiens
atggcgtggattgtccttgctttgctattcacacggagcaggaccagggctgatcctgcagacgtgctgccccctggtgcatttgagaagactcgcatgcatgcactgcccccgcctcttggtttgactttagatgacggtgaagtgatcaccacaagattgctcactgatgcttctgtgcaaaaagtcgtggtccggatatctgaatcctcctcctgcctccacaatgggctgctatccggtaacggctgtgaggtccattaccgcagggcgaggctcttccaggacgctcagatgcctgctcagagcccagcttatcggggggatctgcgagctcctgtcaacgccctgagaattcagaaccggagtcagctcagcccaggtggaaagatcaagtggcggcagcacaggcagctggaaggtacccacagaaagaaatcgagcactatgttcagaaagatccactccatctttaactccagcccacagagaaagacggcggccgagagccccttctacgaaggagccagccccgcagtgaagctgattcgaagcagttccatgtatgtggtcggggaccacggggagaaattcagcgagtccttaaagaagtacaaaagcaccagtagcatggacaccagcctgtactacctgcggcaggaggaggaccgggcgtggatgtattcgcgcacccaggactgcctgcagtacctgcaggagctgctggccttgcgcaaaaaatatctcagcagcttcagtgatctgaagccccaccgcacccaggggatttcctcaacctcctccaaatcctccaagggagggaaaaagactcctgtccggtctactcccaaagaaataaagaaagcaaccccaaagaaatactcgcagttcagtgctgatgtggccgaggccattgccttctttgactccatcattgcagagctggatacagagagacgaccccgggctgctgaggccagcctgccaaatgaagatgtggactttgacgttttctgtgctgccacggctctaggctgcctctccaacactctggtgccatgtttggacaatgttttccctgtggtccacttaccacggctgagacagacggccagtttcgaaggagcaccgagcacaggaccgtgggcactcagaggagactcgagaggcaccccatttatttgcccaaggctgtggaaggggccttcaacacctggaaatttaagcccaaagcctgcaaaaaagacctggggagctccagacagatccttttcaacttctcaggagaagatatggagtgggatgcagagctctttgcgttggagccccagttgtctcctggggaggactactatgagacagagaaccccaaaggacagtggctgcttcgagaaagactttgggagcggacggtgccctgactccatctggattccttgacgtgtctcagactgggtccctgagaagctgtccgctttcagcgcagcatgaggtatttggtagagttgaaaatgccaattgtaacacagtcaacccactcagcacactgcctgctggtgccgtgccagtgccaaacagacctgtggcttcccaggggacaggtctcaggacactctcagagcttgagtttctctgcgtgggctgatgaccagggacttacagcctggctggtcttcaagagctgaaggaatggaaggtcttgagtggagtgtctgggctcactcccctgacctcacctggcctggtcctcattctccacgtgtctgtccag

SEQ ID NO: 7152 - protein, 479 aa, Homo sapiens
MAWIVLALLFTRSRTRADPADVLPPGAFEKTRMHALPPPLGLTLDDGEVITTRLLTDASVQKVVVRISESSSCLHNGLLSGNGCEVHYRRARLFQDAQMPAQSPAYRGDLRAPVNALRIQNRSQLSPGGKIKWRQHRQLEGTHRKKSSTMFRKIHSIFNSSPQRKTAAESPFYEGASPAVKLIRSSSMYVVGDHGEKFSESLKKYKSTSSMDTSLYYLRQEEDRAWMYSRTQDCLQYLQELLALRKKYLSSFSDLKPHRTQGISSTSSKSSKGGKKTPVRSTPKEIKKATPKKYSQFSADVAEAIAFFDSIIAELDTERRPRAAEASLPNEDVDFDVFCAATALGCLSNTLVPCLDNVFPVVHLPRLRQTASFEGAPSTGPWALRGDSRGTPFICPRLWKGPSTPGNLSPKPAKKTWGAPDRSFSTSQEKIWSGMQSSLRWSPSCLLGRTTMRQRTPKDSGCFEKDFGSGRCPDSIWIP

SEQ ID NO: 7153 - DNA, 2407 bp, Homo sapiens
gggagagggcgcggcgcggggttcgcggctggcgcttgagttgtttgccggctcccgggccgccagacgctcggagggagcccggccggctcggactgggcggccgggagggagggcgccccgggtcacgacggcgcccgcaagccgagcgcggccgggacgtgcaccatggacccaaaggcgggcggcggcggcgaggaggacgactgcgtggactcgggcgccgagaccggagggtccgactacagccacctgtcctccacgagcagtgagctttccgttgaagaggcgcaggaccctttcctggtcagcatccacataatcgcagacccaggggagtcccagcccctgcaggaggccatcgacaacgtcctggcgtggatccaccccgacctcccgctgttccgggtgtccgagaggcgggcgtcccggcggcggcggaagccccccaagggcgctcagccagcgctggctgtggtgctgttcctgcaggaggagtacggcgaagagcagatcctgcagctgcaccgcacactgcagcagccgccctggcgccaccaccacaccgagcaggtgcacggccggttcctgccctacctgccctgcagccaggacttcttcacgctggcccctgggacgccgctttgggccatccggcccgtgcactacggcaaggaaatcgtgcgcttcaccgtctactgtcgctacgacaactatgctgacagcctcaggttctaccagctgattctccggaggagccccagccagaagaaagcggacttctgcatcttccctattttttccaacctggatgtggacatccagttctccctgaaaagactgccctgtgaccagtgcccggtgcccaccgactcctccgtgctggagttccgagtgagggacataggcgagctcgtgcctctcctgcccaacccttgcagccccatcagcgaggggcgctggcagacggaggaccatgatgggaacaagatcctcctacaggtactggggggacgcctgtctgtctgtttaggggacctgagaaaccagttagctttgcctcaaacactatagtaccagtcacagagcaatgatcaaggaaggagagatcagtgaccctctgcccagctcctagtcgaagtcaaagtggccatacaggatcccaacaaaagagggggcaagaaagactcttcccattggttctcttcatttcactttcagcaaacatgttcccaattcttccagctgccccttctgtcctcccctattgggcatccactaaacacccatgactcctggggatttcaaatgagcttataagctagggaatttgctattaaagattcctgaatctatgcccatgtacttagagagtttttaccactggattcttccctcccacaaaggaacttcaggaaagcccatctatctggaaattttaaaatatatattgatgttcatagaggagatagctgttctcttccttcaggtgcctcccccaccttctactcttgcatccttctactgctgggcagcaggttgttgaaatcctgtgatcacttggaaaaggatgtcccgttaaacattttaaggagtaagtgatgccttgggagcttctggtttcactaagcttggaaggggtgaaggaattcattttaagtaggctgccctagtccttccatggtaaactctttagcttcatcatcagctccctttctcctctcatccttccaggggttgtcccagactcattagagataattagttatactcaattcaaaattcagcatgtatattacagaacatcctacatctggtcctacctgagaaatgctttccagacccaggctttcttgattttacaagtaaattagttccaggagtatagggccttgtttttctgaaaagcctctacctctgacgtctcaattttcacacttggctacccgaaaagagaaagttgatagtgaattgggggacattgccttaagaggcaaagattgtggttacttgaatcacaggtaaagtttcatcgtttttgttggttttggctttaagcaccagaactataatccacatatcatgaaatgaagtcagaatttggcacatgtcagataactggttcagactacagccaggcctcatttctcgtcagaaaggtcaccttgagatacttactatttataggaactagataattttgaaacttccttttgaactgtgcagataaggaactaagtaatgttttattattcaatatgctagcatttgctctataatcccttttgaaatgtgagaaaaattgtctctgtgtttgaagaatgccacatctttatgcaaaatataatacagttgcaccaagtaaaagttaatgaaatgcaaaggatattgtttatactaaaagacc

SEQ ID NO: 7154 - protein, 301 aa, Homo sapiens
MDPKAGGGGEEDDCVDSGAETGGSDYSHLSSTSSELSVEEAQDPFLVSIHIIADPGESQPLQEAIDNVLAWIHPDLPLFRVSERRASRRRRKPPKGAQPALAVVLFLQEEYGEEQILQLHRTLQQPPWRHHHTEQVHGRFLPYLPCSQDFFTLAPGTPLWAIRPVHYGKEIVRFTVYCRYDNYADSLRFYQLILRRSPSQKKADFCIFPIFSNLDVDIQFSLKRLPCDQCPVPTDSSVLEFRVRDIGELVPLLPNPCSPISEGRWQTEDHDGNKILLQVLGGRLSVCLGDLRNQLALPQTL

SEQ ID NO: 7155 - DNA, 4348 bp, Homo sapiens
gggagagggcgcggcgcggggttcgcggctggcgcttgagttgtttgccggctcccgggccgccagacgctcggagggagcccggccggctcggactgggcggccgggagggagggcgccccgggtcacgacggcgcccgcaagccgagcgcggccgggacgtgcaccatggacccaaaggcgggcggcggcggcgaggaggacgactgcgtggactcgggcgccgagaccggagggtccgactacagccacctgtcctccacgagcagtgagctttccgttgaagaggcgcaggaccctttcctggtcagcatccacataatcgcagacccaggggagtcccagcccctgcaggaggccatcgacaacgtcctggcgtggatccaccccgacctcccgctgttccgggtgtccgagaggcgggcgtcccggcggcggcggaagccccccaagggcgctcagccagcgctggctgtggtgctgttcctgcaggaggagtacggcgaagagcagatcctgcagctgcaccgcacactgcagcagccgccctggcgccaccaccacaccgagcaggtgcacggccggttcctgccctacctgccctgcagccaggacttcttcacgctggcccctgggacgccgctttgggccatccggcccgtgcactacggcaaggaaatcgtgcgcttcaccgtctactgtcgctacgacaactatgctgacagcctcaggttctaccagctgattctccggaggagccccagccagaagaaagcggacttctgcatcttccctattttttccaacctggatgtggacatccagttctccctgaaaagactgccctgtgaccagtgcccggtgcccaccgactcctccgtgctggagttccgagtgagggacataggcgagctcgtgcctctcctgcccaacccttgcagccccatcagcgaggggcgctggcagacggaggaccatgatgggaacaagatcctcctacaggcacaaagggtgcataagaagtttcctaaacctggcagagtacatcatgcctccgagaagaaacgtcattccactcctttgccgagcactgctgtaccaagccatacacctggcagcagccagcagtccccgctcaacagtcctcacccggggcccatccggacaggcctgcctcctgggcaccagcaggaatttgccggacgagccaacagcacccccaaccctccctggtctttccagagaagcaagtccttgttttgtttgcccacgggaggcccctccctggcctcctcagctgaaccacagtggttttcaaacacaggtgccccagggcacagggcatcagagtggaggcatggccacctcctctccatcgatgacctagagggggcccaggagacagacgtggacacaggcctgcggctgtcctcatcggacctgtctgtggtctctgcatattctgcacccagtaggttctgcagcacagtggagacacccctcccctccgaaagatgcagcagccactgggcagctcacaaggattccagggagggaccactgcccactgtcagcagggtgaccacagaggcctcctgggcttccctccctttcttcaccaaaaggtcttccagctcctcagcgacagctcgtgctgctcccccagctcccagcacctccaccctcacagactcctccccacagctcccatgcgatacccccaaagtcaagcagactgatggagacatgccaccacccccagggtcggctggccccggggataacgacatggaggaattctacatctgaatgccctctgctcttgttctcgaaacacacaaactcagagacacagactcaggccccactgcccctctggccactgagcacaccacattcttcatgatccatttcccaggagcccgtagcacatttgcctaccacccactcttagctggggggtggtatatctctagagacacagcagaaaaatactggcatttttatgcaaataaattctcaacaaacttgtcataaaatatattttttgaatattcagcatttgaggtatggtttagtgggtttatacaatttaaatggcttatataattatttgaaatgaaaagaaaacctagtcagccagaaccaatttggcaatttttccatggtatgaaggcaaatcaattaaggccaaaacgttgaatgtgggagagatagtaagtgacttgtatgagggattactgcataataacgtaacgcacaccttactggattctccatatatatttacattaccagagaacagtggccctagggatgtttaagcactgcttataatggaaaaagtcagcttgagaagtaaacgtatatcagactacaggtaattcctcatcttgaagccatgcaacacctgcaaatctggatttatacaaaagttgctaatgtgtttcataaagatttagcatgagtaacagactcttggtgcatttaaaatatgtgagttccagaaagtagatttgcatacaccttttcaacagcacatttcactggaatggatgaggggcttctgaagaccactccactacctgaatttatttggatcactgaggaagagcatttgttgggattacagaattataggccattagacatcatgggtaggtagtcttaagatccttcaactttcaaaaaccacagtctaaggactatattcaaatgacaagagccgcactgtatactgctttctgcagtgaccatgctgggtcacgcatcctatgtttctcatttttaaatgatttggaacattttagccagcattttgatcacacagattaataatgctgttctccccaaaacgggaaactttacctgaaacgctctcctgaacaaacaccagtgcactgccagcctcacatgattgcatgggagctttaattaacgctggagcccagcaaccttggcttttcctgcctgttatctgctactgtcacaccgtgaatggtatttgaatctcacctccctctcacctcagtaagagtatgtttgtttacagccccaacctcagcaatgccaaaggctggcatcgggggcagtgccaagctgtccctggatactatttacctttgaggaagaacagcatgggtttgccaagctcaattcccaggctggtgctccttgaattaatcatggcacagtgttcatctctctggaaatgcccacgccagcccagacacagcctcagagtcctttccaacacgaccctccaggcagcagttaccaaccatcagtcttcagctgaagcttcaagtctttgccatccttgtaatgacagccttaggccttgccccaagcattctggactctctaacactcagaattgtaatgtaatattctgctctaatttaaatttttaaaaatatagtctcctaattcaggataaggagtaagcaaactttctgaaaagggctagataataagtattttaggctttgccagtcatatggtctcttgcagctactcaactctgccactgtagtatgaaagcagccatgagtaatatgttaatgaatgggaatggctgagttccaataaagctttattttttttttatttgagacggggtcttgctctgttgcccaggctggagtgcaatggcgcaatctcagctcactgcaagctctgcctcctgggttcaagccattctcctgcctcagcctcccaagtagctgcgactacaggtgcgcaccacaatgcctggctaattttttgtatttttagtagagacagagtttcaccatgttggccaggttggtctcaaactcctgacttcgtgatccacccaccttggcctcccaaagcactgggattacaggcatgagccaccattcccagccaataaaactttatttacaagaacagctggtgggccagatttggcccaagggtcatagtttattatcccttgagctaggctgctgcctgaggttgattcaacatcccagctccagtcaacaacaaaaattctaagtctcccgcctaatgctgctgtggtgtgtcatgccaaaaaagtgggctactcaggttagaccaatgacttcagaaccacagggctcagaacaggaaggagcttctttctgcagagctgattcctggaaagccaccagcactccaccttctgcccagaaatgtgattcagtcaatagctgatgaggaaaagcaacctgcaaacattaggaagaaggagaaaaataattcagaggtgatgataccacctccaatgaacagggaagcaagttcatcagtaacaaaagtcagtgaggcaaaaaaaaaaaaaaaaaaaaaaaaaaaa

SEQ ID NO: 7156 - protein, 546 aa, Homo sapiens
MDPKAGGGGEEDDCVDSGAETGGSDYSHLSSTSSELSVEEAQDPFLVSIHIIADPGESQPLQEAIDNVLAWIHPDLPLFRVSERRASRRRRKPPKGAQPALAVVLFLQEEYGEEQILQLHRTLQQPPWRHHHTEQVHGRFLPYLPCSQDFFTLAPGTPLWAIRPVHYGKEIVRFTVYCRYDNYADSLRFYQLILRRSPSQKKADFCIFPIFSNLDVDIQFSLKRLPCDQCPVPTDSSVLEFRVRDIGELVPLLPNPCSPISEGRWQTEDHDGNKILLQAQRVHKKFPKPGRVHHASEKKRHSTPLPSTAVPSHTPGSSQQSPLNSPHPGPIRTGLPPGHQQEFAGRANSTPNPPWSFQRSKSLFCLPTGGPSLASSAEPQWFSNTGAPGHRASEWRHGHLLSIDDLEGAQETDVDTGLRLSSSDLSVVSAYSAPSRFCSTVETPLPSERCSSHWAAHKDSREGPLPTVSRVTTEASWASLPFFTKRSSSSSATARAAPPAPSTSTLTDSSPQLPCDTPKVKQTDGDMPPPPGSAGPGDNDMEEFYI

SEQ ID NO: 7157 - DNA, 4419 bp, Homo sapiens
gagttgtttgccggctcccgggccgccagacgctcggagggagcccggccggctcggactgggcggccgggagggagggcgccccgggtcacgacggcgcccgcaagccgagcgcggccgggacgtgcaccatggacccaaaggcgggcggcggcggcgaggaggacgactgcgtggactcgggcgccgagaccggagggtccgactacagccacctgtcctccacgagcaatggattctccacctggcggatgccatgttgcctgttcctttactgtacacacggtgacaaagaaaagggaagatggagcctccaggttgaacatacctggccctcaggtgagctttccgttgaagaggcgcaggaccctttcctggtcagcatccacataatcgcagacccaggggagtcccagcccctgcaggaggccatcgacaacgtcctggcgtggatccaccccgacctcccgctgttccgggtgtccgagaggcgggcgtcccggcggcggcggaagccccccaagggcgctcagccagcgctggctgtggtgctgttcctgcaggaggagtacggcgaagagcagatcctgcagctgcaccgcacactgcagcagccgccctggcgccaccaccacaccgagcaggtgcacggccggttcctgccctacctgccctgcagccaggacttcttcacgctggcccctgggacgccgctttgggccatccggcccgtgcactacggcaaggaaatcgtgcgcttcaccgtctactgtcgctacgacaactatgctgacagcctcaggttctaccagctgattctccggaggagccccagccagaagaaagcggacttctgcatcttccctattttttccaacctggatgtggacatccagttctccctgaaaagactgccctgtgaccagtgcccggtgcccaccgactcctccgtgctggagttccgagtgagggacataggcgagctcgtgcctctcctgcccaacccttgcagccccatcagcgaggggcgctggcagacggaggaccatgatgggaacaagatcctcctacaggcacaaagggtgcataagaagtttcctaaacctggcagagtacatcatgcctccgagaagaaacgtcattccactcctttgccgagcactgctgtaccaagccatacacctggcagcagccagcagtccccgctcaacagtcctcacccggggcccatccggacaggcctgcctcctgggcaccagcaggaatttgccggacgagccaacagcacccccaaccctccctggtctttccagagaagcaagtccttgttttgtttgcccacgggaggcccctccctggcctcctcagctgaaccacagtggttttcaaacacaggtgccccagggcacagggcatcagagtggaggcatggccacctcctctccatcgatgacctagagggggcccaggagacagacgtggacacaggcctgcggctgtcctcatcggacctgtctgtggtctctgcatattctgcacccagtaggttctgcagcacagtggagacacccctcccctccgaaagatgcagcagccactgggcagctcacaaggattccagggagggaccactgcccactgtcagcagggtgaccacagaggcctcctgggcttccctccctttcttcaccaaaaggtcttccagctcctcagcgacagctcgtgctgctcccccagctcccagcacctccaccctcacagactcctccccacagctcccatgcgatacccccaaagtcaagcagactgatggagacatgccaccacccccagggtcggctggccccggggataacgacatggaggaattctacatctgaatgccctctgctcttgttctcgaaacacacaaactcagagacacagactcaggccccactgcccctctggccactgagcacaccacattcttcatgatccatttcccaggagcccgtagcacatttgcctaccacccactcttagctggggggtggtatatctctagagacacagcagaaaaatactggcatttttatgcaaataaattctcaacaaacttgtcataaaatatattttttgaatattcagcatttgaggtatggtttagtgggtttatacaatttaaatggcttatataattatttgaaatgaaaagaaaacctagtcagccagaaccaatttggcaatttttccatggtatgaaggcaaatcaattaaggccaaaacgttgaatgtgggagagatagtaagtgacttgtatgagggattactgcataataacgtaacgcacaccttactggattctccatatatatttacattaccagagaacagtggccctagggatgtttaagcactgcttataatggaaaaagtcagcttgagaagtaaacgtatatcagactacaggtaattcctcatcttgaagccatgcaacacctgcaaatctggatttatacaaaagttgctaatgtgtttcataaagatttagcatgagtaacagactcttggtgcatttaaaatatgtgagttccagaaagtagatttgcatacaccttttcaacagcacatttcactggaatggatgaggggcttctgaagaccactccactacctgaatttatttggatcactgaggaagagcatttgttgggattacagaattataggccattagacatcatgggtaggtagtcttaagatccttcaactttcaaaaaccacagtctaaggactatattcaaatgacaagagccgcactgtatactgctttctgcagtgaccatgctgggtcacgcatcctatgtttctcatttttaaatgatttggaacattttagccagcattttgatcacacagattaataatgctgttctccccaaaacgggaaactttacctgaaacgctctcctgaacaaacaccagtgcactgccagcctcacatgattgcatgggagctttaattaacgctggagcccagcaaccttggcttttcctgcctgttatctgctactgtcacaccgtgaatggtatttgaatctcacctccctctcacctcagtaagagtatgtttgtttacagccccaacctcagcaatgccaaaggctggcatcgggggcagtgccaagctgtccctggatactatttacctttgaggaagaacagcatgggtttgccaagctcaattcccaggctggtgctccttgaattaatcatggcacagtgttcatctctctggaaatgcccacgccagcccagacacagcctcagagtcctttccaacacgaccctccaggcagcagttaccaaccatcagtcttcagctgaagcttcaagtctttgccatccttgtaatgacagccttaggccttgccccaagcattctggactctctaacactcagaattgtaatgtaatattctgctctaatttaaatttttaaaaatatagtctcctaattcaggataaggagtaagcaaactttctgaaaagggctagataataagtattttaggctttgccagtcatatggtctcttgcagctactcaactctgccactgtagtatgaaagcagccatgagtaatatgttaatgaatgggaatggctgagttccaataaagctttattttttttttatttgagacggggtcttgctctgttgcccaggctggagtgcaatggcgcaatctcagctcactgcaagctctgcctcctgggttcaagccattctcctgcctcagcctcccaagtagctgcgactacaggtgcgcaccacaatgcctggctaattttttgtatttttagtagagacagagtttcaccatgttggccaggttggtctcaaactcctgacttcgtgatccacccaccttggcctcccaaagcactgggattacaggcatgagccaccattcccagccaataaaactttatttacaagaacagctggtgggccagatttggcccaagggtcatagtttattatcccttgagctaggctgctgcctgaggttgattcaacatcccagctccagtcaacaacaaaaattctaagtctcccgcctaatgctgctgtggtgtgtcatgccaaaaaagtgggctactcaggttagaccaatgacttcagaaccacagggctcagaacaggaaggagcttctttctgcagagctgattcctggaaagccaccagcactccaccttctgcccagaaatgtgattcagtcaatagctgatgaggaaaagcaacctgcaaacattaggaagaaggagaaaaataattcagaggtgatgataccacctccaatgaacagggaagcaagttcatcagtaacaaaagtcagtgaggcaaaaaaaaaaaaaaaaaaaaaaaaaaaa

SEQ ID NO: 7158 - protein, 582 aa, Homo sapiens
MDPKAGGGGEEDDCVDSGAETGGSDYSHLSSTSNGFSTWRMPCCLFLYCTHGDKEKGRWSLQVEHTWPSGELSVEEAQDPFLVSIHIIADPGESQPLQEAIDNVLAWIHPDLPLFRVSERRASRRRRKPPKGAQPALAVVLFLQEEYGEEQILQLHRTLQQPPWRHHHTEQVHGRFLPYLPCSQDFFTLAPGTPLWAIRPVHYGKEIVRFTVYCRYDNYADSLRFYQLILRRSPSQKKADFCIFPIFSNLDVDIQFSLKRLPCDQCPVPTDSSVLEFRVRDIGELVPLLPNPCSPISEGRWQTEDHDGNKILLQAQRVHKKFPKPGRVHHASEKKRHSTPLPSTAVPSHTPGSSQQSPLNSPHPGPIRTGLPPGHQQEFAGRANSTPNPPWSFQRSKSLFCLPTGGPSLASSAEPQWFSNTGAPGHRASEWRHGHLLSIDDLEGAQETDVDTGLRLSSSDLSVVSAYSAPSRFCSTVETPLPSERCSSHWAAHKDSREGPLPTVSRVTTEASWASLPFFTKRSSSSSATARAAPPAPSTSTLTDSSPQLPCDTPKVKQTDGDMPPPPGSAGPGDNDMEEFYI

SEQ ID NO: 7159 - DNA, 566 bp, Homo sapiens
tcggactgggcggccgggagggagggcgccccgggtcacgacggcgcccgcaagccgagcgcggccgggacgtgcaccatggacccaaaggcgggcggcggcggcgaggaggacgactgcgtggactcgggcgccgagaccggaggattctcaaagtagctggtgatctattccaaaccaagtttgggcaagatatgagacatttcattttcaacacactgtgtctgaggtgttgcaagacatccaagtaaagatgatgaatcagcagttgggtatatctgtctggaactcagaagggaggtcttcatgatgacattgcatttgggtactatttacctaaaaatggcaatggaagctctgggagagactaaatcaactgaagatgaggaaatggagactcagagggcacatggctcgttagaggcatgaattgaagcctggatctccagtatgcttcccacctagtgaagttgcctctccaggagctgtctgatctgtaattaattcttgttttctgctcagacattttcttttgcttgaaatgctgctgctgctgtctcacccac

SEQ ID NO: 7160 - protein, 40 aa, Homo sapiens [sequence omitted]

SEQ ID NO: 7161 - DNA, 1231 bp, Homo sapiens
tttttgaaaagttaaaaattccttaattttttattcctggtaccactaccacaatttacagggcaatatacctgatgtaatgaaaagaaaaagaaaaagacaaagctacaacagataaaagacctcaggaatctacatctagttgacactatattgcattaatcaatagctgcactttttgcaaactgtggctatgagagtcctgaacaagaagggtttcctgtttaagctgcagtaaattttctgactatggatcattgttccttctgtggcagatttttacagttcctctaatgcatttgggacaactctctcgaggtaacctgcagctttcctgacaactccttgctctctctcctgctaagaactgtagcccttttctgctgtttttagaaccttctgctaccatatccaccacttccaccaccagatccataaccaccaccatagggactgcccgagcttcttccaccaaaactgccccctttcatgggtccataatttgattgctgttgtccactatgatttccaaaatcattatagttcccaccaccaccatagttaccaccgccaaaatttcctccttcattgtaaccatcatatcctccaccacctccaccatatccaccaccttggtttccatatcctgttccaccaccaccatagccccctctactactataaccaggaccaccaccatagttgccaccgtcacgtccaaatctattatatccaccatcacctcttccataacttcctctgctgccaccacctccaccaccatagcctcctcttccaccaaagtttccaccaaggccaaaattacctccagcacctccaaagtttcctccgcgacccataaaattgccagatccacctccatgacctctctgtgatccagcagactgcatctcttgtttagaaagggcctttttcacttcacaattatgcccattaatagtgtggtatttctgaacaacaattttatcaattatatcatgatcatcaaaagttacaaaagcaaatcctctcttttttccactctgcctgtcttccataacttctatggtttcaatcttgctacacttttcaaagtagtctctcaaattatattcttctgtatcttctttaataccaccaacaaaaattttcttcactgttagatgggcaacgggctttacagaatcctctctagaaacagctctctttggttccactacaagacattttc

SEQ ID NO: 7162 - protein, 124 aa, Homo sapiens
MISKIIIVPTTTIVTTAKISSFIVTIISSTTSTISTTLVSISCSTTTIAPSTTITRTTTIVATVTSKSIISTITSSITSSAATTSTTIASSSTKVSTKAKITSSTSKVSSATHKIARSTSMTSL

SEQ ID NO: 7163 - DNA, 498 bp, Homo sapiens
caggcaagcaacgaagaccagatgaaatgctgcttgaagggctggcatatctagaattggtggtagaaatatctttgcttgaaagtttgctcaagaaacaccatgcatatttgacatcataaggaaagaaatgagcagaaccatacatccaacttacattgcaattactgcagaggaagagagatggagaagttaaaatgaaacatttcaaggatgaatgggcactgaaaattggtaaagtggcagaaaagtccaagcttgaagaatgaaaaagtaaatgtatggagaaaaaggagtttggaaaacaggaaaaaaaaagatattttgcagaaacatctgtttgctgttgctaaaaattttagcatttaaatgttctcatttgggctctgaagttagcacttccttgaagtagttcacacctttgctattgctcctgttcagctacagatcattttatgcaaggctgattttaacaagaaaatggtgcattaatttaca

SEQ ID NO: 7164 - protein, 31 aa, Homo sapiens
MLLEGLAYLELVVEISLLESLLKKHHAYLTS

SEQ ID NO: 7165 - DNA, 6226 bp, Homo sapiens
agttcagagagaggagagggagaaggagagaggggcagaggggaagggagagagggagagcacgcgagacggaaaggagcgcctcagagtctctgaagcacgcaagagataaccgattaggaatttttcgggcaactgtcacccggatagctgtcagagaatcatcatcaccgcaactctgacgtttcctacaagaagttagagacttaagcagtattggcatcggatggaaatggtatgcatgctgctgtggaaaatatccctgagctgaagaagtgcaactatgtgttgtgtgtgctaaatgcccagaagaacccagacccagtgggtaagagagacgaaatgtggagagaatgactaacgacaaatccgtgaatttgttctctggagttgctaatttgccagcccgaagcaacacattttacaaggaggaaacattttgctgcttctgatttctccccaaactggtgctaccagatgcatggctttctatgtgttggaacaaatcattcctaactgcagcatactgggaaaggggaaaggttgaggcaactaaccggctgtctccaaataagtgatgagatataatgcatcctccagtccatgcacgcttcctcttgcaatttgtgcatcattcctcagtggaaacctttaaaccctaaaatccaggaaaagaaaataaatacattatcatggacctgagggatttttacctgttggctgctctgattgcctgtttaaggctggattccgcaatagctcaagaacttatttacactattagagaggaattgcctgaaaatgtgcccataggaaacataccaaaggatctgaacatttctcacatcaatgctgccacagggaccagcgccagccttgtctacagactggtttctaaagctggggatgcccctttggtgaaagtttccagcagcactggggaaattttcacaacctccaacagaatagacagagaaaaactctgtgctggcgcctcatatgctgaggagaatgagtgtttctttgaacttgaggtggtgatcctccccaatgatttcttcaggctgatcaaaataaaaataattgtcaaggataccaatgataatgcccccatgtttccatctcctgtcatcaatatttccattccagaaaacactttgatcaacagccgctttccaattccatcagcaacagatcctgacacaggcttcaatggtgtacagcattatgaattgttaaatgggcagagtgtttttggactggatatcgtggaaactccagagggagagaagtggccacaactgattgttcagcaaaacttggatagagaacagaaagatacctatgtgatgaaaatcaaagtagaggatggaggcactccacagaaatccagtacggccatactgcaggtcacagtaagtgatgtaaatgacaacaggccagtgtttaaagagggtcaagtggaggtgcatattccagagaatgctcccgtaggtacctctgtaattcagctccatgccactgatgcagatataggcagtaatgctgaaatccggtacatttttggtgcccaggtcgcccctgcaaccaaaagactctttgctttaaataatactactgggctgattacagttcagaggtccttagatagagaggagacagccattcacaaagtgacagtgctggctagtgacggcagctccactcctgctcgagcaacggttaccatcaatgtcaccgatgtaaatgataaccctcctaatatagacctcaggtacattataagtcccatcaatggcaccgtgtatttatctgagaaagatcctgtcaatacaaagattgccctaattacagtttcagataaggacacagatgtgaatggcaaagtgatctgttttattgaaagagaggtcccatttcatttgaaggcggtatatgacaaccaatatttgttagagacctcttctttgttggactatgagggcaccaaagaattcagctttaaaattgttgcctctgattctgggaagcccagtttaaatcagactgccctggtaagggttaagcttgaggatgaaaatgacaacccaccaattttcaaccagcctgtaattgagctgtcagtttctgaaaacaaccgacgtgggttatacttaacaactattagtgccacagatgaagacagtgggaaaaatgcagacattgtttatcagcttggaccgaatgcctccttctttgatctggaccgaaaaacaggagttttgacagcctccagagtatttgacagagaagaacaagaacgattcatttttacagtaactgccagggacaatgggacccctcccctccaaagccaagcggctgtgattgttactgttctggatgagaatgacaatagccccaagtttactcataatcattttcaattttttgtgtctgagaatctgccaaagtatagtactgtgggggtaatcacagtgacagatgcagatgctggagagaataaagctgtgactctttccattctaaatgacaatgataattttgtgttggatccctattctggagtcataaagtcaaatgtctcatttgatagagagcagcagagttcctacacttttgatgtcaaagccactgatggaggacaaccacctcgttcctctactgcaaaagtaactatcaacgtcatggatgtcaatgacaacagcccagttgtcatttctccaccgtctaatacttcctttaagttggtgcccctctcagccattcctggctccgtggtagcagaagtttttgcagtggatgttgacactggaatgaacgctgaactaaagtatactatagtgagtggaaacaataaaggcttattccggattgatccagtaacaggtaacattactctggaagaaaaaccagcacctactgatgtgggattgcatcgtttggtggtcaacataagtgacctggggtaccctaagtctttgcacacgcttgtgcttgtattcctttatgttaacgacactgctggaaatgcctcctatatctatgacttgatccgcaggactatggagaccccgttggacaggaacataggggatagtagccaaccctatcaaaatgaggactatctaaccatcatgattgccatcatcgccggtgccatggtggtcattgttgtgatcttcgtcaccgttctggtgcgctgtcgccatgcatcaaggttcaaagcagctcagaggagcaagcaaggtgccgaatggatgtccccaaaccaggagaacaagcaaaacaagaaaaagaaaagaaagaaaaggaagtctcccaaaagctctcttttgaactttgttactatcgaagagtccaaacccgatgatgcagttcatgaacctatcaatgggacaataagcctgccggctgaactggaggagcaaagtataggaagatttgactggggcccggcacctccaacaacattcaagcctaacagtcctgacctggccaagcactacaaatctgcttctccacagcctgcttttcatctcaaaccagacactccagtttccgtgaaaaagcaccacgtgattcaggaactccctttggacaacacctttgttgggggttgtgacaccctttctaaacgctcttccactagttcagatcacttcagtgcctcagagtgcagttcccaaggaggcttcaagacaaagggccccttacacaccagacagtgtaactcacacagcaaaagtgacaatattcctgtcactcctcagaaatgtcccagctccacgggtttccacattcaggagaatgaagaaagccattacgagtcgcagcgccgtgttacgtttcatctccctgatggctcccaggaaagctgcagtgacagtggtctaggagaccatgagccggtgggtagtggaaccctgatctcacaccctcttcctctggttcagccacaggacgaattctatgaccaggcctctccggacaagaggactgaagcagatggcaactctgatcccaactctgatgggcctttgggtccccgaggattagctgaagctacagagatgtgcactcaagagtgcttggttttgggtcactctgataattgctggatgcctcctggcttgggtccatatcaacaccccaaatctcctctctcaacctttgcaccccagaaagaatgggtgaagaaggacaagcttgtgaatgggcacaccctgaccagagcctggaaagaagacagcaacaggaaccagttcaatgaccgtaagcagtatggctccaatgaaggccatttcaacaatggcagccacatgacagacattcctctggcaaatctgaagtcttataagcaagcaggaggtgctactgagagtcctaaggagcaccaactctaagaaaaggctatatgggacctaataactttaaatagacatgctaataccgtgtgcgtcagagctttatgtattcaatagatctctacaactatgccccttctagcagggatacctataactttgtgttagcaccatggagaatacaatgtttttgcaacatatgagagaagatagttctagccatgcaattttgtttactagaattgattacactctccagagatctctccattgtgcaaattttttttattattgcattttattttgaccctggactgctgctatgaacaatagaatatgcatttggaaagtaagaaagtttcatggattagagtgactgaaaaacatatccagttagaaaattgtgcttttttttttttttttttttttttttgtcattgatttgtgctgggactgctatacttgacattatactgcaaacaaaacttaaagagataagcattaaacctattgtgctgttaacaacgttagtggacacttgtaagtcaatcagtgttaaagtatttgtaaatagaagcaagctattattaacaacttttgtgtacttataatgttcacctaaaaatgttgtagcataattctgtgttttatggttgcttctgtccttctttttatttacctctttgttgttatttttgttgtttctttcagtgaggtgtttctgtgttagtagtctgtcttgacacacattgttcaaacaatctcaagcacttgtgtttaaaaaaggttctgaaatcttgcttctcatatgatagcttatgatgccggaattctgtaaacaataaagatgaaagaaaaaatgaaaactttatacaaaaaaggacttctgcaaaagcttggaaattcagaacctattttttatcatcttattttcaaagtaggcaaaagcaaaatcacttaattagtaccattaagtgagagagtaatggaaaactgttatccatcaaaagtgatataatatcctgtacttgtcactcatgtaaaactaatgtatcaaaattagcatatatggaagaaaaatcactattcaaaaatagtttcaattgggcaaatgtgtgtctacaactttgttgaaatggcagagtctgtgttgatcctcatatacaataatgttgttgtaacacaagtgttattagaccatagccacaaaatatttaatgtgttgtgccttcatgatgtaacagaacattctccaggtagggtagttgggggaaataaagggataaatctctaattattgctgtttaactgtttgttatcatagttggtcaatgcctggcaggtaccagcatattgtcacttaggtcaaaccaataaagtgacaactaatgttaataagatctcagttgcacgtgcaaacaaatccaaattcgaacattcttaggaggtttttgttaaggcatgacagatgatttaaacaaataaatagcatgcaacaaaatgtctttattgaaagaagtggaagttatcttaatgccacggttcaccatcaatttaaaagtaaaaaaaacaaaaaaaaaacaaaaaatttaaaaaaaaggtttgctaatctgatagttaatttgttcttaccaaaaaataaaattactttgtaaatagcagttcacatttttccacagtataatggaaaataatgggtaggggtgcattgcttattgaagtacatttttgtcggtttgtgaggggtgtttgatgactttgacagaataaatatctaaacaattatccttgttactgctttgccagttctacgttatttacaattattcagctcttgcaataaatgttctgaattcctg

SEQ ID NO: 7166 - protein, 1237 aa, Homo sapiens; identical to SEQ ID NO: 982

SEQ ID NO: 7167 - DNA, 6124 bp, Homo sapiens
agttcagagagaggagagggagaaggagagaggggcagaggggaagggagagagggagagcacgcgagacggaaaggagcgcctcagagtctctgaagcacgcaagagataaccgattaggaatttttcgggcaactgtcacccggatagctgtcagagaatcatcatcaccgcaactctgacgtttcctacaagaagttagagacttaagcagtattggcatcggatggaaatggtatgcatgctgctgtggaaaatatccctgagctgaagaagtgcaactatgtgttgtgtgtgctaaatgcccagaagaacccagacccagtgggtaagagagacgaaatgtggagagaatgactaacgacaaatccgtgaatttgttctctggagttgctaatttgccagcccgaagcaacacattttacaaggaggaaacattttgctgcttctgatttctccccaaactggtgctaccagatgcatggctttctatgtgttggaacaaatcattcctaactgcagcatactgggaaaggggaaaggttgaggcaactaaccggctgtctccaaataagtgatgagatataatgcatcctccagtccatgcacgcttcctcttgcaatttgtgcatcattcctcagtggaaacctttaaaccctaaaatccaggaaaagaaaataaatacattatcatggacctgagggatttttacctgttggctgctctgattgcctgtttaaggctggattccgcaatagctcaagaacttatttacactattagagaggaattgcctgaaaatgtgcccataggaaacataccaaaggatctgaacatttctcacatcaatgctgccacagggaccagcgccagccttgtctacagactggtttctaaagctggggatgcccctttggtgaaagtttccagcagcactggggaaattttcacaacctccaacagaatagacagagaaaaactctgtgctggcgcctcatatgctgaggagaatgagtgtttctttgaacttgaggtggtgatcctccccaatgatttcttcaggctgatcaaaataaaaataattgtcaaggataccaatgataatgcccccatgtttccatctcctgtcatcaatatttccattccagaaaacactttgatcaacagccgctttccaattccatcagcaacagatcctgacacaggcttcaatggtgtacagcattatgaattgttaaatgggcagagtgtttttggactggatatcgtggaaactccagagggagagaagtggccacaactgattgttcagcaaaacttggatagagaacagaaagatacctatgtgatgaaaatcaaagtagaggatggaggcactccacagaaatccagtacggccatactgcaggtcacagtaagtgatgtaaatgacaacaggccagtgtttaaagagggtcaagtggaggtgcatattccagagaatgctcccgtaggtacctctgtaattcagctccatgccactgatgcagatataggcagtaatgctgaaatccggtacatttttggtgcccaggtcgcccctgcaaccaaaagactctttgctttaaataatactactgggctgattacagttcagaggtccttagatagagaggagacagccattcacaaagtgacagtgctggctagtgacggcagctccactcctgctcgagcaacggttaccatcaatgtcaccgatgtaaatgataaccctcctaatatagacctcaggtacattataagtcccatcaatggcaccgtgtatttatctgagaaagatcctgtcaatacaaagattgccctaattacagtttcagataaggacacagatgtgaatggcaaagtgatctgttttattgaaagagaggtcccatttcatttgaaggcggtatatgacaaccaatatttgttagagacctcttctttgttggactatgagggcaccaaagaattcagctttaaaattgttgcctctgattctgggaagcccagtttaaatcagactgccctggtaagggttaagcttgaggatgaaaatgacaacccaccaattttcaaccagcctgtaattgagctgtcagtttctgaaaacaaccgacgtgggttatacttaacaactattagtgccacagatgaagacagtgggaaaaatgcagacattgtttatcagcttggaccgaatgcctccttctttgatctggaccgaaaaacaggagttttgacagcctccagagtatttgacagagaagaacaagaacgattcatttttacagtaactgccagggacaatgggacccctcccctccaaagccaagcggctgtgattgttactgttctggatgagaatgacaatagccccaagtttactcataatcattttcaattttttgtgtctgagaatctgccaaagtatagtactgtgggggtaatcacagtgacagatgcagatgctggagagaataaagctgtgactctttccattctaaatgacaatgataattttgtgttggatccctattctggagtcataaagtcaaatgtctcatttgatagagagcagcagagttcctacacttttgatgtcaaagccactgatggaggacaaccacctcgttcctctactgcaaaagtaactatcaacgtcatggatgtcaatgacaacagcccagttgtcatttctccaccgtctaatacttcctttaagttggtgcccctctcagccattcctggctccgtggtagcagaagtttttgcagtggatgttgacactggaatgaacgctgaactaaagtatactatagtgagtggaaacaataaaggcttattccggattgatccagtaacaggtaacattactctggaagaaaaaccagcacctactgatgtgggattgcatcgtttggtggtcaacataagtgacctggggtaccctaagtctttgcacacgcttgtgcttgtattcctttatgttaacgacactgctggaaatgcctcctatatctatgacttgatccgcaggactatggagaccccgttggacaggaacataggggatagtagccaaccctatcaaaatgaggactatctaaccatcatgattgccatcatcgccggtgccatggtggtcattgttgtgatcttcgtcaccgttctggtgcgctgtcgccatgcatcaaggttcaaagcagctcagaggagcaagcaaggtgccgaatggatgtccccaaaccaggagaacaagcaaaacaagaaaaagaaaagaaagaaaaggaagtctcccaaaagctctcttttgaactttgttactatcgaagagtccaaacccgatgatgcagttcatgaacctatcaatgggacaataagcctgccggctgaactggaggagcaaagtataggaagatttgactggggcccggcacctccaacaacattcaagcctaacagtcctgacctggccaagcactacaaatctgcttctccacagcctgcttttcatctcaaaccagacactccagtttccgtgaaaaagcaccacgtgattcaggaactccctttggacaacacctttgttgggggttgtgacaccctttctaaacgctcttccactagttcagatcacttcagtgcctcagagtgcagttcccaaggaggcttcaagacaaagggccccttacacaccagacagtcgcagcgccgtgttacgtttcatctccctgatggctcccaggaaagctgcagtgacagtggtctaggagaccatgagccggtgggtagtggaaccctgatctcacaccctcttcctctggttcagccacaggacgaattctatgaccaggcctctccggacaagaggactgaagcagatggcaactctgatcccaactctgatgggcctttgggtccccgaggattagctgaagctacagagatgtgcactcaagagtgcttggttttgggtcactctgataattgctggatgcctcctggcttgggtccatatcaacaccccaaatctcctctctcaacctttgcaccccagaaagaatgggtgaagaaggacaagcttgtgaatgggcacaccctgaccagagcctggaaagaagacagcaacaggaaccagttcaatgaccgtaagcagtatggctccaatgaaggccatttcaacaatggcagccacatgacagacattcctctggcaaatctgaagtcttataagcaagcaggaggtgctactgagagtcctaaggagcaccaactctaagaaaaggctatatgggacctaataactttaaatagacatgctaataccgtgtgcgtcagagctttatgtattcaatagatctctacaactatgccccttctagcagggatacctataactttgtgttagcaccatggagaatacaatgtttttgcaacatatgagagaagatagttctagccatgcaattttgtttactagaattgattacactctccagagatctctccattgtgcaaattttttttattattgcattttattttgaccctggactgctgctatgaacaatagaatatgcatttggaaagtaagaaagtttcatggattagagtgactgaaaaacatatccagttagaaaattgtgcttttttttttttttttttttttttttgtcattgatttgtgctgggactgctatacttgacattatactgcaaacaaaacttaaagagataagcattaaacctattgtgctgttaacaacgttagtggacacttgtaagtcaatcagtgttaaagtatttgtaaatagaagcaagctattattaacaacttttgtgtacttataatgttcacctaaaaatgttgtagcataattctgtgttttatggttgcttctgtccttctttttatttacctctttgttgttatttttgttgtttctttcagtgaggtgtttctgtgttagtagtctgtcttgacacacattgttcaaacaatctcaagcacttgtgtttaaaaaaggttctgaaatcttgcttctcatatgatagcttatgatgccggaattctgtaaacaataaagatgaaagaaaaaatgaaaactttatacaaaaaaggacttctgcaaaagcttggaaattcagaacctattttttatcatcttattttcaaagtaggcaaaagcaaaatcacttaattagtaccattaagtgagagagtaatggaaaactgttatccatcaaaagtgatataatatcctgtacttgtcactcatgtaaaactaatgtatcaaaattagcatatatggaagaaaaatcactattcaaaaatagtttcaattgggcaaatgtgtgtctacaactttgttgaaatggcagagtctgtgttgatcctcatatacaataatgttgttgtaacacaagtgttattagaccatagccacaaaatatttaatgtgttgtgccttcatgatgtaacagaacattctccaggtagggtagttgggggaaataaagggataaatctctaattattgctgtttaactgtttgttatcatagttggtcaatgcctggcaggtaccagcatattgtcacttaggtcaaaccaataaagtgacaactaatgttaataagatctcagttgcacgtgcaaacaaatccaaattcgaacattcttaggaggtttttgttaaggcatgacagatgatttaaacaaataaatagcatgcaacaaaatgtctttattgaaagaagtggaagttatcttaatgccacggttcaccatcaatttaaaagtaaaaaaaacaaaaaaaaaacaaaaaatttaaaaaaaaggtttgctaatctgatagttaatttgttcttaccaaaaaataaaattactttgtaaatagcagttcacatttttccacagtataatggaaaataatgggtaggggtgcattgcttattgaagtacatttttgtcggtttgtgaggggtgtttgatgactttgacagaataaatatctaaacaattatccttgttactgctttgccagttctacgttatttacaattattcagctcttgcaataaatgttctgaattcctg

SEQ ID NO: 7168 - protein, 1203 aa, Homo sapiens; identical to SEQ ID NO: 980

SEQ ID NO: 7169 - DNA, 539 bp, Homo sapiens
cggcatcataagctatcatatgagaagcaagatttcagaaccttttttaaacacaagtgcttgagattgtttgaacaatgtgtgtcaagacagactactaacacagaaacacctcactgaaagaaacaacaaaaataacaacaaagaggtttgatgactggcttacagagaagaataaggaaatgtacctctaagaatcgtttgaaatgagtcttcatatcctcccaaatatttttcaagaacgtttggcattacttcaaaaattaactttaggaaaggaactattatcacattttaagaggggaattgcagttgcacttaaactagaaacttccacttggtgaattgaattattaaggaataatggcagaagaaagagtaagtcgtttataggcaataataagcaataaaaatatatgtatatgtgcatgcaaaaagttatggcaaaactaataagattttaaaaaatcattgtgttcctgaagaaacaaagaactggttttcttctaaggaattaaagagttttgtttctttggctt

SEQ ID NO: 7170 - protein, 45 aa, Homo sapiens [sequence omitted]

SEQ ID NO: 7171 - DNA, 2328 bp, Homo sapiens
gagctttgaactttctttgttttagaaaattgcattgatatagtgttactctcttgtgatattgtgttgatatgacattactctcttaggagacagtaattttctaaaacaaagtcatattctctcaagttttcctcccctaacttggacaatccctacctaatctccagggatagactcctatcatatttccaaactattaattatagcagaaactagatgtcttttgggattagccttttaaaaatagagcattccaacccttacaggtcaaaagccctggatttcaagaatctgtctctgctatgagtctcaagagcctattttgtaactcagaagccaaggacaacaaatgctaccatacttattctgagtcttcctggtcagaaaccaagaagatagtcattgcaacaaaaatacacagctttcagacattctcttcctgctactcagattgtcacgggatacttggggtgttgcttcaccagctggaaacctctgtggctggtggtaccttctgcctgagtattgctcatgcctggtgggctcgctttgcccactcatcctggaaggctgcactcggctcatgctatcagcctggattccatacctgccaagggcaagccaggctcggatcagtgaggggtgtgtgggcaagtgagcatggggttcagccacagcgcacaggcaggcacactggctgctgcggcagggtgggcagcttcaggcactgcagctgaaccagatgtactacatgcagcttctgttgtgggcacccatgcctggacaaggggaatgcagtggtgcctggaaacttggagatgccaggaaccacagagcctcaaagacagtatcatcatagccctaacttggggagcccctaggtctgggcttccctaagggcggcaactcttttctccttcccgtcgctcacaacatggtgagtggcaggtcatgtttcagccctgtttgtgttatagccctttcagtcctgccattcagcaggtcctgagttcttgtcccacatccaggaagaatgaggtacatggacaactggagggtaaacaaggtggagagaagcttcattgagtgacaggacagctttcaatagacccaaagtgggtagctcctttccgcaggcaggttgcagccctcagcggagagaccaagcatgggtagctgccatctgcaggcaagttgtcccaacatctctgtgagtatggctgagtggtggatggggcggaatggagagagagtcctttatgggcttcagaaggaaggaagtgcattgtgcatgctgattagtccatgggcagccataggcaggcctggaaaaagcaccataagttcttactccaagccatggactccagccagaactgacagcccagaccccatactttaggtcatctctggcttgaaggtggggcttcactgtgcacccacccttttctatgcagaagtctgtcttcctcctgctgctatcatattgtccatagtgcccacgctgctcatgctgaggagtgcctgcaggcccgacaagctgccgtcaaccctgcctcagcctccctcccatgctgatcagtgcataaagtccaagggggccaagggccagggtttggcatgtcagcgtcaccccaaacatgcgcacccacaggcaggtcagaagagcacccgggcttgccctcaactttgctctgaaatcagagtgggcaccaggcacagggagaagccaggcagtgggagtaggcacttctgagcccgcgaggctgagggggctcagaggtccccaggagcacagggtgcccacgtccgcagctgtggctgggtagctgcagcagtgcctcggagggcagggctcccaccctgccaattcagaagggggcagggctccccctgttcccagccctagctgcacctccccaacttcagcccatgtcttcacagcagccactcccaacgggctgccactgccaacaagatgacctattttgccaatattcatcaactagaacatatttcacaccacagtgttgataaaggaatatgccaataagatggatgctttcatttatgatgaaaataattattacagagaagagtctgtataatggcagctataacaactggatctacttgacaaggtggatgtaacatttcaaactattgaaaaggatgctttgaattaatataaaataaagaatggggctggaaataacccatctaccattttactgaatgaaaaaatcattactattctgtatatactgtgaagctagtaaattgagacataaaatattttttgtgaattaaaaaataagtcaaatc

SEQ ID NO: 7172 - protein, 144 aa, Homo sapiens
MSLKSLFCNSEAKDNKCYHTYSESSWSETKKIVIATKIHSFQTFSSCYSDCHGILGVLLHQLETSVAGGTFCLSIAHAWWARFAHSSWKAALGSCYQPGFHTCQGQARLGSVRGVWASEHGVQPQRTGRHTGCCGRVGSFRHCS

SEQ ID NO: 7173 - DNA, 2229 bp, Homo sapiens
gacttgtgcgtcctggctgcgtgtctcaggcagggctttcgtgctcgcagtgtcggggtgggaaacctgtgccggatgtccgaggggctttgcagaaagcctggcagtgggcggcgtgacctctgcctgggggcggagtggctccttggggctggaaggcagttctcttgagttgggggagatcttagctggggagagggaggcgggggaagtgtgctcctgcatttcgtgacacgtacccttcggaggcgcccgcggcccccgcctgtctgagtctggggatcgtaagcaggggggcagcctggcccatggacagcgtcagtccgcctggagaaactcccctggggatcggctgtgtcccacctgctggggacggtgttggggcacagagaggcgataaactaagtgaaagcaaagagcagcgttgtcttctgccattcttttggaggagttcagatgtgttctaagcctgctggagtgaccacacttccaagacctgatggaggccagagctcagagtggcaacgggtcgcagcccttgctgcagacgccccgtgacggtggcagacagcgtggggagcccgaccccagagacgccctcacccagcaggtacatgtcttgtctctggatcagatcagagccatccgaaacaccaatgagtacacagaggggcctactgtcgtcccaagacctgggctcaagcctgctcctcgcccctccactcagcacaaacacgagagactccacggtctgcctgagcaccgccagcctcctaggctccagcactcgcaggtccattcttctgcacgagcccctctgtccagatccataagcacggtcagctcagggtcgcggagcagtacgaggacaagtaccagcagcagctcctctgaacagagactgctaggatcatccttctcctccgggcctgttgctgatggcataatccgggtgcaacccaaatctgagctcaagccaggtgagcttaagccactgagcaaggaagatttgggcctgcacgcctacaggtgtgaggactgtggcaagtgcaaatgtaaggagtgcacctacccaaggcctctgccatcagactggatctgcgacaagcagtgcctttgctcggcccagaacgtgattgactatgggacttgtgtatgctgtgtgaaaggtctcttctatcactgttctaatgatgatgaggacaactgtgctgacaacccatgttcttgcagccagtctcactgttgtacacgatggtcagccatgggtgtcatgtccctctttttgccttgtttatggtgttaccttccagccaagggttgccttaaattgtgccaggggtgttatgaccgggttaacaggcctggttgccgctgtaaaaactcaaacacagtttgctgcaaagttcccactgtcccccctaggaactttgaaaaaccaacatagcatcattaatcaggaatattacagtaatgaggattttttctttctttttttaatacacatatgcaaccaactaaacagttataatcttggcactgttaatagaaaggtgggatagtctttgctgtttgcggtgaaatgctttttgtccatgtgccgttttaactgatatgcttgttagaactcagctaatggagctcaaagtatgagatacagaacttggtgacccatgtattgcataagctaaagcaacacagacactcctaggcaaagtttttgtttgtgaatagtacttgcaaaacttgtaaattagcagatgacttttttccattgttttctccagagagaatgtgctatatttttgtatatacaataatatttgcaactgtgaaaaacaagttgtgccatactacatggcacagacacaaaatattatactaatatgttgtacattcggaagaatgtgaatcaatcagtatgtttttagattgtattttgccttacagaaagcctttattgtaagactctgatttccctttggacttcatgtatattgtacagttacagtaaaattcaacctttattttctaattttttcaacatattgtttagtgtaaagaatatttatttgaagttttattattttataaaaaagaatatttattttaagaggcatcttacaaattttgccccttttatgaggatgtgatagttgctgcaaatgaggggttacagatgcatatgtccaatataaaatagaaaatatattaacgtttgaaattaaa

SEQ ID NO: 7174 - protein, 52 aa, Homo sapiens
MDSVSPPGETPLGIGCVPPAGDGVGAQRGDKLSESKEQRCLLPFFWRSSDVF

SEQ ID NO: 7175 - DNA, 2708 bp, Homo sapiens
ggggggactgggaaagagaagaggggcggaggtagggagtccagctttgaagaaggaggccagggatcggatcggcagaaatcacttaaaaaataaaaacaaaaaagcccccttttatttcaaagatgctactttgactgcaagcaaatctgcaccgaaagtttacagctccgggagctgggtcctgcgcgcccggagtgagcagtgggaccctggaaaatgccctttttttaaaaagccatttttctttcactttaagaaatatgatatcttttttttttctctcgacccaaaaggagataggcgtgtgcagattacaggcaatgcccccttcggtcagtgcagcgtggagtcgccgtgtgtgcgtgggttggacttgtgcgtcctggctgcgtgtctcaggcagggctttcgtgctcgcagtgtcggggtgggaaacctgtgccggatgtccgaggggctttgcagaaagcctggcagtgggcggcgtgacctctgcctgggggcggagtggctccttggggctggaaggcagttctcttgagttgggggagatcttagctggggagagggaggcgggggaagtgtgctcctgcatttcgtgacacgtacccttcggaggcgcccgcggcccccgcctgtctgagtctggggatcgtaagcaggggggcagcctggcccatggacagcgtcagtccgcctggagaaactcccctggggatcggctgtgtcccacctgctggggacggtgttggggcacagagaggcgataaactaagtgaaagcaaagagcagcgttgtcttctgccattcttttggaggtgaggagatccggtttccagcactgccttgctccgaattgggagacgtttgtcacctgccttgttcgctgtggcctctattctaaagagcggagatcggataaaggagttcagatgtgttctaagcctgctggagtgaccacacttccaagacctgatggaggccagagctcagagtggcaacgggtcgcagcccttgctgcagacgccccgtgacggtggcagacagcgtggggagcccgaccccagagacgccctcacccagcaggtacatgtcttgtctctggatcagatcagagccatccgaaacaccaatgagtacacagaggggcctactgtcgtcccaagacctgggctcaagcctgctcctcgcccctccactcagcacaaacacgagagactccacggtctgcctgagcaccgccagcctcctaggctccagcactcgcaggtccattcttctgcacgagcccctctgtccagatccataagcacggtcagctcagggtcgcggagcagtacgaggacaagtaccagcagcagctcctctgaacagagactgctaggatcatccttctcctccgggcctgttgctgatggcataatccgggtgcaacccaaatctgagctcaagccaggtgagcttaagccactgagcaaggaagatttgggcctgcacgcctacaggtgtgaggactgtggcaagtgcaaatgtaaggagtgcacctacccaaggcctctgccatcagactggatctgcgacaagcagtgcctttgctcggcccagaacgtgattgactatgggacttgtgtatgctgtgtgaaaggtctcttctatcactgttctaatgatgatgaggacaactgtgctgacaacccatgttcttgcagccagtctcactgttgtacacgatggtcagccatgggtgtcatgtccctctttttgccttgtttatggtgttaccttccagccaagggttgccttaaattgtgccaggggtgttatgaccgggttaacaggcctggttgccgctgtaaaaactcaaacacagtttgctgcaaagttcccactgtcccccctaggaactttgaaaaaccaacatagcatcattaatcaggaatattacagtaatgaggattttttctttctttttttaatacacatatgcaaccaactaaacagttataatcttggcactgttaatagaaaggtgggatagtctttgctgtttgcggtgaaatgctttttgtccatgtgccgttttaactgatatgcttgttagaactcagctaatggagctcaaagtatgagatacagaacttggtgacccatgtattgcataagctaaagcaacacagacactcctaggcaaagtttttgtttgtgaatagtacttgcaaaacttgtaaattagcagatgacttttttccattgttttctccagagagaatgtgctatatttttgtatatacaataatatttgcaactgtgaaaaacaagttgtgccatactacatggcacagacacaaaatattatactaatatgttgtacattcggaagaatgtgaatcaatcagtatgtttttagattgtattttgccttacagaaagcctttattgtaagactctgatttccctttggacttcatgtatattgtacagttacagtaaaattcaacctttattttctaattttttcaacatattgtttagtgtaaagaatatttatttgaagttttattattttataaaaaagaatatttattttaagaggcatcttacaaattttgccccttttatgaggatgtgatagttgctgcaaatgaggggttacagatgcatatgtccaatataaaatagaaaatatattaacgtttgaaattaaa

SEQ ID NO: 7176 - protein, 315 aa, Homo sapiens; identical to SEQ ID NO: 986

SEQ ID NO: 7177 - DNA, 2447 bp, Homo sapiens
gcagagctccctgcctcctccggaaaggcgagggcgcaggccaacggcgagccccccccgggcgggccccagaccctcctcctcctcctcctcctcctcttcctcctcctccgcacccaccgcccccgcctcggcctcgctgcctcgcctccacaacgcccagtctgcaccgccgagagctgcgcgccgcagcgctagcggaggagaggggccggcggagcgcgcagcgcccaggcccccgcgcccgcccggcccggcccggcccgcgcccccgcgccgcctccgctacgacgcggccccggccgcaccacttggcgatctggctttaggttctccgtaaggccgttttcttttcccattcgctcatctgccaggaaaagggacttgccgttggcgcttcggcctcttgttcattgagaaaaaagaggaaatactccgcgtgcgcttgtagaaggggagtcgtctccagctccgaaccccggagtgttcatcagcggggaatctggctccgaattctctttttttctcccgccgattgctcggaagttggtctaaagcagaggttggaaagaaaggaaaaaagtttgcatcgagactggatttatttgcacatcgcagaaagaagagaatccaagggagaggggttggtgcaaagccgcgatcacggagttcagatgtgttctaagcctgctggagtgaccacacttccaagacctgatggaggccagagctcagagtggcaacgggtcgcagcccttgctgcagacgccccgtgacggtggcagacagcgtggggagcccgaccccagagacgccctcacccagcaggtacatgtcttgtctctggatcagatcagagccatccgaaacaccaatgagtacacagaggggcctactgtcgtcccaagacctgggctcaagcctgctcctcgcccctccactcagcacaaacacgagagactccacggtctgcctgagcaccgccagcctcctaggctccagcactcgcaggtccattcttctgcacgagcccctctgtccagatccataagcacggtcagctcagggtcgcggagcagtacgaggacaagtaccagcagcagctcctctgaacagagactgctaggatcatccttctcctccgggcctgttgctgatggcataatccgggtgcaacccaaatctgagctcaagccaggtgagcttaagccactgagcaaggaagatttgggcctgcacgcctacaggtgtgaggactgtggcaagtgcaaatgtaaggagtgcacctacccaaggcctctgccatcagactggatctgcgacaagcagtgcctttgctcggcccagaacgtgattgactatgggacttgtgtatgctgtgtgaaaggtctcttctatcactgttctaatgatgatgaggacaactgtgctgacaacccatgttcttgcagccagtctcactgttgtacacgatggtcagccatgggtgtcatgtccctctttttgccttgtttatggtgttaccttccagccaagggttgccttaaattgtgccaggggtgttatgaccgggttaacaggcctggttgccgctgtaaaaactcaaacacagtttgctgcaaagttcccactgtcccccctaggaactttgaaaaaccaacatagcatcattaatcaggaatattacagtaatgaggattttttctttctttttttaatacacatatgcaaccaactaaacagttataatcttggcactgttaatagaaaggtgggatagtctttgctgtttgcggtgaaatgctttttgtccatgtgccgttttaactgatatgcttgttagaactcagctaatggagctcaaagtatgagatacagaacttggtgacccatgtattgcataagctaaagcaacacagacactcctaggcaaagtttttgtttgtgaatagtacttgcaaaacttgtaaattagcagatgacttttttccattgttttctccagagagaatgtgctatatttttgtatatacaataatatttgcaactgtgaaaaacaagttgtgccatactacatggcacagacacaaaatattatactaatatgttgtacattcggaagaatgtgaatcaatcagtatgtttttagattgtattttgccttacagaaagcctttattgtaagactctgatttccctttggacttcatgtatattgtacagttacagtaaaattcaacctttattttctaattttttcaacatattgtttagtgtaaagaatatttatttgaagttttattattttataaaaaagaatatttattttaagaggcatcttacaaattttgccccttttatgaggatgtgatagttgctgcaaatgaggggttacagatgcatatgtccaatataaaatagaaaatatattaacgtttgaaattaaa

SEQ ID NO: 7178 - protein, 315 aa, Homo sapiens; identical to SEQ ID NO: 986

SEQ ID NO: 7179 - DNA, 1690 bp, Homo sapiens
tgaggagatccggtttccagcactgccttgctccgaattgggagacgtttgtcacctgccttgttcgctgtggcctctattctaaagagcggagatcggataaaggagttcagatgtgttctaagcctgctggagtgaccacacttccaagacctgatggaggccagagctcagagtggcaacgggtcgcagcccttgctgcagacgccccgtgacggtggcagacagcgtggggagcccgaccccagagacgccctcacccagcaggtacatgtcttgtctctggatcagatcagagccatccgaaacaccaatgagtacacagaggggcctactgtcgtcccaagacctgggctcaagcctgctcctcgcccctccactcagcacaaacacgagagactccacggtctgcctgagcaccgccagcctcctaggctccagcactcgcaggtccattcttctgcacgagcccctctgtccagatccataagcacggtcagctcagggtcgcggagcagtacgaggacaagtaccagcagcagctcctctgaacagagactgctaggatcatccttctcctccgggcctgttgctgatggcataatccgggtgcaacccaaatctgagctcaagccaggtgagcttaagccactgagcaaggaagatttgggcctgcacgcctacaggtgtgaggactgtggcaagtgcaaatgtaaggagtgcacctacccaaggcctctgccatcagactggatctgcgacaagcagtgcctttgctcggcccagaacgtgattgactatgggacttgtgtatgctgtgtgaaaggtctcttctatcactgttctaatgatgatgaggacaactgtgctgacaacccatgttcttgcagccagtctcactgttgtacacgatggtcagccatgggtgtcatgtccctctttttgccttgtttatggtgttaccttccagccaagggttgccttaaattgtgccaggggtgttatgaccgggttaacaggcctggttgccgctgtaaaaactcaaacacagtttgctgcaaagttcccactgtcccccctaggaactttgaaaaaccaacatagcatcattaatcaggaatattacagtaatgaggattttttctttctttttttaatacacatatgcaaccaactaaacagttataatcttggcactgttaatagaaaggtgggatagtctttgctgtttgcggtgaaatgctttttgtccatgtgccgttttaactgatatgcttgttagaactcagctaatggagctcaaagtatgagatacagaacttggtgacccatgtattgcataagctaaagcaacacagacactcctaggcaaagtttttgtttgtgaatagtacttgcaaaacttgtaaattagcagatgacttttttccattgttttctccagagagaatgtgctatatttttgtatatacaataatatttgcaactgtgaaaaacaagttgtgccatactacatggcacagacacaaaatattatactaatatgttgtacattcggaagaatgtgaatcaatcagtatgtttttagattgtattttgccttacagaaagcctttattgtaagactctgatttccctttggacttcatgtatattgtacagttacagtaaaattcaacctttattttct

SEQ ID NO: 7180 - protein, 315 aa, Homo sapiens; identical to SEQ ID NO: 986

SEQ ID NO: 7181 - DNA, 2033 bp, Homo sapiens
gacttgtgcgtcctggctgcgtgtctcaggcagggctttcgtgctcgcagtgtcggggtgggaaacctgtgccggatgtccgaggggctttgcagaaagcctggcagtgggcggcgtgacctctgcctgggggcggagtggctccttggggctggaaggcagttctcttgagttgggggagatcttagctggggagagggaggcgggggaagtgtgctcctgcatttcgtgacacgtacccttcggaggcgcccgcggcccccgcctgtctgagtctggggatcgtaagcaggggggcagcctggcccatggacagcgtcagtccgcctggagaaactcccctggggatcggctgtgtcccacctgctggggacggtgttggggcacagagaggcgataaactaagtgaaagcaaagagcagcgttgtcttctgccattcttttggaggagttcagatgtgttctaagcctgctggagtgaccacacttccaagacctgatggaggccagagctcagagtggcaacgggtcgcagcccttgctgcagacgccccgtgacggtggcagacagcgtggggagcccgaccccagagacgccctcacccagcaggtacatgtcttgtctctggatcagatcagagccatccgaaacaccaatgagtacacagaggggcctactgtcgtcccaagacctgggctcaagcctgctcctcgcccctccactcagcacaaacacgagagactccacggtctgcctgagcaccgccagcctcctaggctccagcactcgcaggtccattcttctgcacgagcccctctgtccagatccataagcacggtcagctcagggtcgcggagcagtacgaggacaagtaccagcagcagctcctctgaacagagactgctaggatcatccttctcctccgggcctgttgctgatggcataatccgggtgcaacccaaatctgagctcaagccaggtgagcttaagccactgagcaaggaagatttgggcctgcacgcctacaggtgtgaggactgtggcaagtgcaaatgtaaggagtgcacctacccaaggcctctgccatcagactggatctgcgacaagcagtgcctttgctcggcccagaacgtgattgactatgggacttgtgtatgctgtgtgaaaggtctcttctatcactgttctaatgatgatgaggacaactgtgctgacaacccatgttcttgcagccagtctcactgttgtacacgatggtcagccatgggtgtcatgtccctctttttgccttgtttatggtgttaccttccagccaagggttgccttaaattgtgccaggggtgttatgaccgggttaacaggcctggttgccgctgtaaaaactcaaacacagtttgctgcaaagttcccactgtcccccctaggaactttgaaaaaccaacatagcatcattaatcaggaatattacagtaatgaggattttttctttctttttttaatacacatatgcaaccaactaaacagttataatcttggcactgttaatagaaaggtgggatagtctttgctgtttgcggtgaaatgctttttgtccatgtgccgttttaactgatatgcttgttagaactcagctaatggagctcaaagtatgagatacagaacttggtgacccatgtattgcataagctaaagcaacacagacactcctaggcaaagtttttgtttgtgaatagtacttgcaaaacttgtaaattagcagatgacttttttccattgttttctccagagagaatgtgctatatttttgtatatacaataatatttgcaactgtgaaaaacaagttgtgccatactacatggcacagacacaaaatattatactaatatgttgtacattcggaagaatgtgaatcaatcagtatgtttttagattgtattttgccttacagaaagcctttattgtaagactctgatttccctttggacttcatgtatattgtacagttacagtaaaattcaacctttattttct

SEQ ID NO: 7182 - protein, 52 aa, Homo sapiens; identical to SEQ ID NO: 7174

SEQ ID NO: 7183 - DNA, 2251 bp, Homo sapiens
gcagagctccctgcctcctccggaaaggcgagggcgcaggccaacggcgagccccccccgggcgggccccagaccctcctcctcctcctcctcctcctcttcctcctcctccgcacccaccgcccccgcctcggcctcgctgcctcgcctccacaacgcccagtctgcaccgccgagagctgcgcgccgcagcgctagcggaggagaggggccggcggagcgcgcagcgcccaggcccccgcgcccgcccggcccggcccggcccgcgcccccgcgccgcctccgctacgacgcggccccggccgcaccacttggcgatctggctttaggttctccgtaaggccgttttcttttcccattcgctcatctgccaggaaaagggacttgccgttggcgcttcggcctcttgttcattgagaaaaaagaggaaatactccgcgtgcgcttgtagaaggggagtcgtctccagctccgaaccccggagtgttcatcagcggggaatctggctccgaattctctttttttctcccgccgattgctcggaagttggtctaaagcagaggttggaaagaaaggaaaaaagtttgcatcgagactggatttatttgcacatcgcagaaagaagagaatccaagggagaggggttggtgcaaagccgcgatcacggagttcagatgtgttctaagcctgctggagtgaccacacttccaagacctgatggaggccagagctcagagtggcaacgggtcgcagcccttgctgcagacgccccgtgacggtggcagacagcgtggggagcccgaccccagagacgccctcacccagcaggtacatgtcttgtctctggatcagatcagagccatccgaaacaccaatgagtacacagaggggcctactgtcgtcccaagacctgggctcaagcctgctcctcgcccctccactcagcacaaacacgagagactccacggtctgcctgagcaccgccagcctcctaggctccagcactcgcaggtccattcttctgcacgagcccctctgtccagatccataagcacggtcagctcagggtcgcggagcagtacgaggacaagtaccagcagcagctcctctgaacagagactgctaggatcatccttctcctccgggcctgttgctgatggcataatccgggtgcaacccaaatctgagctcaagccaggtgagcttaagccactgagcaaggaagatttgggcctgcacgcctacaggtgtgaggactgtggcaagtgcaaatgtaaggagtgcacctacccaaggcctctgccatcagactggatctgcgacaagcagtgcctttgctcggcccagaacgtgattgactatgggacttgtgtatgctgtgtgaaaggtctcttctatcactgttctaatgatgatgaggacaactgtgctgacaacccatgttcttgcagccagtctcactgttgtacacgatggtcagccatgggtgtcatgtccctctttttgccttgtttatggtgttaccttccagccaagggttgccttaaattgtgccaggggtgttatgaccgggttaacaggcctggttgccgctgtaaaaactcaaacacagtttgctgcaaagttcccactgtcccccctaggaactttgaaaaaccaacatagcatcattaatcaggaatattacagtaatgaggattttttctttctttttttaatacacatatgcaaccaactaaacagttataatcttggcactgttaatagaaaggtgggatagtctttgctgtttgcggtgaaatgctttttgtccatgtgccgttttaactgatatgcttgttagaactcagctaatggagctcaaagtatgagatacagaacttggtgacccatgtattgcataagctaaagcaacacagacactcctaggcaaagtttttgtttgtgaatagtacttgcaaaacttgtaaattagcagatgacttttttccattgttttctccagagagaatgtgctatatttttgtatatacaataatatttgcaactgtgaaaaacaagttgtgccatactacatggcacagacacaaaatattatactaatatgttgtacattcggaagaatgtgaatcaatcagtatgtttttagattgtattttgccttacagaaagcctttattgtaagactctgatttccctttggacttcatgtatattgtacagttacagtaaaattcaacctttattttct

SEQ ID NO: 7184 - protein, 315 aa, Homo sapiens; identical to SEQ ID NO: 986

SEQ ID NO: 7185 - DNA, 471 bp, Homo sapiens
atggtcaaccctactgtgttcttcgacatcaccgtcgatggcgagcccttgggcagcgtctccttcgagctgtttgcagagaagtttccaaagacagaagaaaactttcatcttctgagcactggagagaaaggatttggttataaaagttcctgctttcacagaattattccagggtttatgtgtcggggtgatgacttcacatgccataacagcactggtggcaagtccgtctatggggagaagtttgttgacgagaacttcgtcctgaagcatacagatcctggcatcttgtccagggcaaatgctggacccagtacaaatggttcccagttttttacctgcactgctaagaccgagtggttcggcaaggtgaaagaacgcatgattattgtggaggccatggggcgctttgcggggaatgggaagaccagcaagaagatcgctgttgctgactgtgggctactctaa

SEQ ID NO: 7186 - protein, 156 aa, Homo sapiens [sequence omitted]

SEQ ID NO: 7187 - DNA, 3447 bp, Homo sapiens
gggaggacgaggggcgcgtggttttcccatctcatccctggaggaggggctggagcatccccggcagccaatcagggacaggctgggggggggaccgctttgaagaagtttgggggaaaaaagtttggaaaagtttctataataacgagggggcttctggagggaggcggcagcgacggaggagggggcttctcagagaaagggagggagggagccacccgggtgaagatacagcagcctcctgaactcccccctcccacccaggccgggacctgggggctcctgccggatccatgggggcggccagctgcgaggatgaggagctggaatttaagctggtgttcggggaggaaaaggaggcccccccgctgggcgcggggggattgggggaagaactggactcagaggatgccccgccatgctgccgtctggccttgggagagccccctccctatggcgctgcacctatcggtattccccgacctccaccccctcggcctggcatgcattcgccaccgccgcgaccagccccctcacctggcacctgggagagccagcccgccaggtcggtgaggctgggaggaccaggagggggtgctgggggtgctgggggtggccgtgttctcgagtgtcccagcatccgcatcacctccatctctcccacgccggagccgccagcagcgctggaggacaaccctgatgcctggggggacggctctcctagagattaccccccaccagaaggctttgggggctacagagaagcagggggccagggtgggggggccttcttcagcccaagccctggcagcagcagcctgtcctcgtggagcttcttctccgatgcctctgacgaggcagccctgtatgcagcctgcgacgaggtggagtctgagctaaatgaggcggcctcccgctttggcctgggctccccgctgccctcgccccgggcctcccctcggccatggacccccgaagatccctggagcctgtatggtccaagccccggaggccgagggccagaggatagctggctactcctcagtgctcctgggcccaccccagcctccccgcggcctgcctctccatgtggcaagcggcgctattccagctcgggaaccccatcttcagcctccccagctctgtcccgccgtggcagcctgggggaagaggggtctgagccacctccaccacccccattgcctctggcccgggacccgggctcccctggtccctttgactatgtgggggccccaccagctgagagcatccctcagaagacacggcggacttccagcgagcaggcagtggctctgcctcggtctgaggagcctgcctcatgcaatgggaagctgcccttgggagcagaggagtctgtggctcctccaggaggttcccggaaggaggtggctggcatggactacctggcagtgccctccccactcgcttggtccaaggcccggattgggggacacagccctatcttcaggtctagggattgagatgggcttgagaatcctctgtatccaagtgaagcctttccaccccaacccctgcgctcagagctgggaagaagggagttttaggcttgttgtcatctttcacacctcaaggggctctgtcccctacttccccttgcttctggacttttggatttcttcatttctttgtcctttttttagtttaaaaaaaattcttttttcccttcttttcacaagtgttaatgtacttctttatttcttctgtgctttcctttctctcagacccataccccctcctccctcacagatccagtacgggcctgactggggtctgaggctgcacatgatcaatgctcttctctcccacccaggacctctgccctacccccactggactggcctctgcccagccaatatgagcagctggagctgaggatcgaggtacagcctagagcccaccaccgggcccactatgagacagaaggcagccgtggagctgtcaaagctgcccctggcggtcaccccgtagtcaagctcctaggctacagtgagaagccactgaccctacagatgttcatcggcactgcagatgaaaggaacctgcggcctcatgccttctatcaggtgcaccgtatcacaggcaagatggtggccacggccagctatgaagccgtagtcagtggcaccaaggtgttggagatgactctgctgcctgagaacaacatggcggccaacattgactgcgcgggaatcctgaagcttcggaattcagacattgagcttcggaagggtgagacggacatcgggcgcaaaaacacacgtgtacggctggtgttccgggtacacgtgccccagggcggcgggaaggtcgtctcagtacaggcagcatcggtgcccatcgagtgctcccagcgctcagcccaggagctgccccaggtggaggcctacagccccagtgcctgctctgtgagaggaggcgaggaactggtactgactggctccaacttcctgccagactccaaggtggtgttcattgagaggggtcctgatgggaagctgcaatgggaggaggaggccacagtgaaccgactgcagagcaacgaggtgacgctgaccctgactgtccccgagtacagcaacaagagggtttcccggccagtccaggtctacttttatgtctccaatgggcggaggaaacgcagtcctacccagagtttcaggtttctgcctgtgatctgcaaagaggagcccctaccggactcatctctgcggggtttcccttcagcatcggcaaccccctttggcactgacatggacttctcaccacccaggcccccctacccctcctatccccatgaagaccctgcttgcgaaactccttacctatcagaaggcttcggctatggcatgccccctctgtacccccagacggggcccccaccatcctacagaccgggcctgcggatgttccctgagactaggggtaccacaggttgtgcccaaccacctgcagtttccttccttccccgccccttccctagtgacccgtatggagggcggggctcctctttctccctggggctgccattctctccgccagccccctttcggccgcctcctcttcctgcatccccaccgcttgaaggccccttcccttcccagagtgatgtgcatcccctacctgctgagggatacaataaggtagggccaggctatggccctggggagggggctccggagcaggagaaatccaggggtggctacagcagcggcttccgagacagtgtccctatccagggtatcacgctggaggaagtgagtgagatcattggccgagacctgagtggcttccctgcacctcctggagaagagcctcctgcctgaaccacgtgaactgtcatcacctggctgttgtgctggaaagctggggacaggttgatggtaataaactgctcaatgaccagtg

SEQ ID NO: 7188 - protein, 437 aa, Homo sapiens
MFIGTADERNLRPHAFYQVHRITGKMVATASYEAVVSGTKVLEMTLLPENNMAANIDCAGILKLRNSDIELRKGETDIGRKNTRVRLVFRVHVPQGGGKVVSVQAASVPIECSQRSAQELPQVEAYSPSACSVRGGEELVLTGSNFLPDSKVVFIERGPDGKLQWEEEATVNRLQSNEVTLTLTVPEYSNKRVSRPVQVYFYVSNGRRKRSPTQSFRFLPVICKEEPLPDSSLRGFPSASATPFGTDMDFSPPRPPYPSYPHEDPACETPYLSEGFGYGMPPLYPQTGPPPSYRPGLRMFPETRGTTGCAQPPAVSFLPRPFPSDPYGGRGSSFSLGLPFSPPAPFRPPPLPASPPLEGPFPSQSDVHPLPAEGYNKVGPGYGPGEGAPEQEKSRGGYSSGFRDSVPIQGITLEEVSEIIGRDLSGFPAPPGEEPPA

SEQ ID NO: 7189 - DNA, 3353 bp, Homo sapiens
gggaggacgaggggcgcgtggttttcccatctcatccctggaggaggggctggagcatccccggcagccaatcagggacaggctgggggggggaccgctttgaagaagtttgggggaaaaaagtttggaaaagtttctataataacgagggggcttctggagggaggcggcagcgacggaggagggggcttctcagagaaagggagggagggagccacccgggtgaagatacagcagcctcctgaactcccccctcccacccaggccgggacctgggggctcctgccggatccatgggggcggccagctgcgaggatgaggagctggaatttaagctggtgttcggggaggaaaaggaggcccccccgctgggcgcggggggattgggggaagaactggactcagaggatgccccgccatgctgccgtctggccttgggagagccccctccctatggcgctgcacctatcggtattccccgacctccaccccctcggcctggcatgcattcgccaccgccgcgaccagccccctcacctggcacctgggagagccagcccgccaggtcggtgaggctgggaggaccaggagggggtgctgggggtgctgggggtggccgtgttctcgagtgtcccagcatccgcatcacctccatctctcccacgccggagccgccagcagcgctggaggacaaccctgatgcctggggggacggctctcctagagattaccccccaccagaaggctttgggggctacagagaagcagggggccagggtgggggggccttcttcagcccaagccctggcagcagcagcctgtcctcgtggagcttcttctccgatgcctctgacgaggcagccctgtatgcagcctgcgacgaggtggagtctgagctaaatgaggcggcctcccgctttggcctgggctccccgctgccctcgccccgggcctcccctcggccatggacccccgaagatccctggagcctgtatggtccaagccccggaggccgagggccagaggatagctggctactcctcagtgctcctgggcccaccccagcctccccgcggcctgcctctccatgtggcaagcggcgctattccagctcgggaaccccatcttcagcctccccagctctgtcccgccgtggcagcctgggggaagaggggtctgagccacctccaccacccccattgcctctggcccgggacccgggctcccctggtccctttgactatgtgggggccccaccagctgagagcatccctcagaagacacggcggacttccagcgagcaggcagtggctctgcctcggtctgaggagcctgcctcatgcaatgggaagctgcccttgggagcagaggagtctgtggctcctccaggaggttcccggaaggaggtggctggcatggactacctggcagtgccctccccactcgcttggtccaaggcccggattgggggacacagccctatcttcaggacctctgccctacccccactggactggcctctgcccagccaatatgagcagctggagctgaggatcgaggtacagcctagagcccaccaccgggcccactatgagacagaaggcagccgtggagctgtcaaagctgcccctggcggtcaccccgtagtcaagctcctaggctacagtgagaagccactgaccctacagatgttcatcggcactgcagatgaaaggaacctgcggcctcatgccttctatcaggtgcaccgtatcacaggcaagatggtggccacggccagctatgaagccgtagtcagtggcaccaaggtgttggagatgactctgctgcctgagaacaacatggcggccaacattgactgcgcgggaatcctgaagcttcggaattcagacattgagcttcggaagggtgagacggacatcgggcgcaaaaacacacgtgtacggctggtgttccgggtacacgtgccccagggcggcgggaaggtcgtctcagtacaggcagcatcggtgcccatcgagtgctcccagcgctcagcccaggagctgccccaggtggaggcctacagccccagtgcctgctctgtgagaggaggcgaggaactggtactgactggctccaacttcctgccagactccaaggtggtgttcattgagaggggtcctgatgggaagctgcaatgggaggaggaggccacagtgaaccgactgcagagcaacgaggtgacgctgaccctgactgtccccgagtacagcaacaagagggtttcccggccagtccaggtctacttttatgtctccaatgggcggaggaaacgcagtcctacccagagtttcaggtttctgcctgtgatctgcaaagaggagcccctaccggactcatctctgcggggtttcccttcagcatcggcaaccccctttggcactgacatggacttctcaccacccaggcccccctacccctcctatccccatgaagaccctgcttgcgaaactccttacctatcagaaggcttcggctatggcatgccccctctgtacccccagacggggcccccaccatcctacagaccgggcctgcggatgttccctgagactaggggtaccacaggttgtgcccaaccacctgcagtttccttccttccccgccccttccctagtgacccgtatggagggcggggctcctctttctccctggggctgccattctctccgccagccccctttcggccgcctcctcttcctgcatccccaccgcttgaaggccccttcccttcccagagtgatgtgcatcccctacctgctgagggatacaataaggtagggccaggctatggccctggggagggggctccggagcaggagaaatccaggggtggctacagcagcggcttccgagacagtgtccctatccagggtatcacgctggaggaagtgagtgagatcattggccgagacctgagtggcttccctgcacctcctggagaagagcctcctgcctgaaccacgtgaactgtcatcacctggcaaccccagccccagcctcagccctgccccctttccctccttcctggagtggtggctacagaagcttggggccaaccctggctcctctttccccagcttctgtctgtctcactgtcttccctcccctcccccagctgaggtgtggccctcaggcctggtgctgccttggagggctgggggaaggagtgtgtggaggagggaggagggtgaagactgaggctaggtgccagaatggactggagtgaaggcgtgtctagagtgtgggctggctgttgtgctggaaagctggggacaggttgatggtaataaactgctcaatgaccagtg

SEQ ID NO: 7190 - protein, 902 aa, Homo sapiens; identical to SEQ ID NO: 988

SEQ ID NO: 7191 - DNA, 4899 bp, Homo sapiens
gggaggacgaggggcgcgtggttttcccatctcatccctggaggaggggctggagcatccccggcagccaatcagggacaggctgggggggggaccgctttgaagaagtttgggggaaaaaagtttggaaaagtttctataataacgagggggcttctggagggaggcggcagcgacggaggagggggcttctcagagaaagggagggagggagccacccgggtgaagatacagcagcctcctgaactcccccctcccacccaggccgggacctgggggctcctgccggatccatgggggcggccagctgcgaggatgaggagctggaatttaagctggtgttcggggaggaaaaggaggcccccccgctgggcgcggggggattgggggaagaactggactcagaggatgccccgccatgctgccgtctggccttgggagagccccctccctatggcgctgcacctatcggtattccccgacctccaccccctcggcctggcatgcattcgccaccgccgcgaccagccccctcacctggcacctgggagagccagcccgccaggtcggtgaggctgggaggaccaggagggggtgctgggggtgctgggggtggccgtgttctcgagtgtcccagcatccgcatcacctccatctctcccacgccggagccgccagcagcgctggaggacaaccctgatgcctggggggacggctctcctagagattaccccccaccagaaggctttgggggctacagagaagcagggggccagggtgggggggccttcttcagcccaagccctggcagcagcagcctgtcctcgtggagcttcttctccgatgcctctgacgaggcagccctgtatgcagcctgcgacgaggtggagtctgagctaaatgaggcggcctcccgctttggcctgggctccccgctgccctcgccccgggcctcccctcggccatggacccccgaagatccctggagcctgtatggtccaagccccggaggccgagggccagaggatagctggctactcctcagtgctcctgggcccaccccagcctccccgcggcctgcctctccatgtggcaagcggcgctattccagctcgggaaccccatcttcagcctccccagctctgtcccgccgtggcagcctgggggaagaggggtctgagccacctccaccacccccattgcctctggcccgggacccgggctcccctggtccctttgactatgtgggggccccaccagctgagagcatccctcagaagacacggcggacttccagcgagcaggcagtggctctgcctcggtctgaggagcctgcctcatgcaatgggaagctgcccttgggagcagaggagtctgtggctcctccaggaggttcccggaaggaggtggctggcatggactacctggcagtgccctccccactcgcttggtccaaggcccggattgggggacacagccctatcttcaggacctctgccctacccccactggactggcctctgcccagccaatatgagcagctggagctgaggatcgaggtacagcctagagcccaccaccgggcccactatgagacagaaggcagccgtggagctgtcaaagctgcccctggcggtcaccccgtagtcaagctcctaggctacagtgagaagccactgaccctacagatgttcatcggcactgcagatgaaaggaacctgcggcctcatgccttctatcaggtgcaccgtatcacaggcaagatggtggccacggccagctatgaagccgtagtcagtggcaccaaggtgttggagatgactctgctgcctgagaacaacatggcggccaacattgactgcgcgggaatcctgaagcttcggaattcagacattgagcttcggaagggtgagacggacatcgggcgcaaaaacacacgtgtacggctggtgttccgggtacacgtgccccagggcggcgggaaggtcgtctcagtacaggcagcatcggtgcccatcgagtgctcccagcgctcagcccaggagctgccccaggtggaggcctacagccccagtgcctgctctgtgagaggaggcgaggaactggtactgactggctccaacttcctgccagactccaaggtggtgttcattgagaggggtcctgatgggaagctgcaatgggaggaggaggccacagtgaaccgactgcagagcaacgaggtgacgctgaccctgactgtccccgagtacagcaacaagagggtttcccggccagtccaggtctacttttatgtctccaatgggcggaggaaacgcagtcctacccagagtttcaggtttctgcctgtgatctgcaaagaggagcccctaccggactcatctctgcggggtttcccttcagcatcggcaaccccctttggcactgacatggacttctcaccacccaggcccccctacccctcctatccccatgaagaccctgcttgcgaaactccttacctatcagaaggcttcggctatggcatgccccctctgtacccccagacggggcccccaccatcctacagaccgggcctgcggatgttccctgagactaggggtaccacaggttgtgcccaaccacctgcagtttccttccttccccgccccttccctagtgacccgtatggagggcggggctcctctttctccctggggctgccattctctccgccagccccctttcggccgcctcctcttcctgcatccccaccgcttgaaggccccttcccttcccagagtgatgtgcatcccctacctgctgagggatacaataaggtagggccaggctatggccctggggagggggctccggagcaggagaaatccaggggtggctacagcagcggcttccgagacagtgtccctatccagggtatcacgctggaggaagtgagtgagatcattggccgagacctgagtggcttccctgcacctcctggagaagagcctcctgcctgaaccacgtgaactgtcatcacctggcaaccccagccccagcctcagccctgccccctttccctccttcctggagtggtggctacagaagcttggggccaaccctggctcctctttccccagcttctgtctgtctcactgtcttccctcccctcccccagctgaggtgtggccctcaggcctggtgctgccttggagggctgggggaaggagtgtgtggaggagggaggagggtgaagactgaggctaggtgccagaatggactggagtgaaggcgtgtctagagtgtgggctggctgttgtgctggaaagctggggacaggttgatggtaataaactgctcaatgaccagtgcttcaggctccagagctctttggagagatgggttggggcagcttactccagccctggcccaaggaggcccagaagttggaaagagatggaatgtggctgggaacattgcatcccaaagagcttctcagtggaggaggctggggaaggcatgagggggctcagaggctccttgactgggaccaggattgggggccagggcttgagtaggcctctccactctcctccttgggggtccagattccttaggagctttgggatgaggcccaggaggctgcatttttccaggtccttagtcttgccaccacacagatgattctgattcatagccaagatgaggacacactgatgtagctgatctctcatttacagaggaggattctaaagttcagagagggaaaggggcttgcctgaggtcacgtagataatcagcagcacattgaacgctgcactcctgggctcctgtccccagcccccattcagacacgctgactcaggaggtccaggcctctaaggcttctctccctggagtgagggtggaggtgagggagagctggcacaagccctccctctggatcctccactcctggggattatgaagatattctggaaagatttgtgcttcagaggtagactgcagaaagcaaacagtctacccagcagctctgaatgtcacctgccctggggcttacagcactatatgagttcctggcctatcctgcaaatatgcccatgctggccttctaaatagctggtacatccatcaccactgacgggcctggcctggaaacctggtttgtcccctgtcttgatggcctacgagaggccaagttccactgggctgggaaaagtcactttgtctgtcttgttcacctggagcctgacacaccgtaggtactgagtacaaatagcttgatttggctaggcttggctgcagggggacgtgcctaaaagacattccgggcatttgcacttgggaaacttgcctcaccttcaggcttgtggggcctctctatgcccaatgagtccaggcagtcctagcaagtactcaggagagcaggggtgggtgtgacagaggctggctctggattgggggacaacagaaccagagtaactcctcgcctgttgctgctttgcaatgaatttcctttacctttctggaacacaagctgctgtgaaccaaactgatatcaagtgattagctcaccgggccttggttgcttttcaaagatccccttcagccccctgccagagtcactgccccataatcaccatgtcagaagggaccctagggcattcgtgtcctatttatcaatcttcagcaccacctctaagatctctgagagagggtggatcagcctctgtgtaaacaaaaagctgttaggacttgttgcctctcaaggtggactattctgttttctgccaggacactgccattcatgcattgtcagatatttattaaacagcagcaaagtgccagccaatttgtcctggaggaattcatagcctcatggggcaaaagtaaataaacagcttattacaattcaac

SEQ ID NO: 7192 - protein, 902 aa, Homo sapiens; identical to SEQ ID NO: 988

SEQ ID NO: 7193 - DNA, 690 bp, Homo sapiens
aataacgagggggcttctggagggaggcggcagcgacggaggagggggcttctcagagaaagggagggagggagccacccgggtgaagatacagcagcctcctgaactcccccctcccacccaggccgggacctgggggctcctgccggatccatgggggcggccagctgcgaggatgaggagctggacctgtatggtccaagccccggaggccgagggccagaggatagctggctactcctcagtgctcctgggcccaccccagcctccccgcggcctgcctctccatgtggcaagcggcgctattccagctcgggaaccccatcttcagcctccccagctctgtcccgccgtggcagcctgggggaagaggggtctgagccacctccaccacccccattgcctctggcccgggacccgggctcccctggtccctttgactatgtgggggccccaccagctgagagcatccctcagaagacacggcggacttccagcgagcaggcagtggctctgcctcggtctgaggagcctgcctcatgcaatgggaagctgcccttgggagcagaggagtctgtggctcctccaggaggttcccggaaggaggtggctggcatggactacctggcagtgccctccccactcgcttggtccaaggcccggattgggggacacagccctatcttcagg

SEQ ID NO: 7194 - protein, 178 aa, Homo sapiens
MGAASCEDEELDLYGPSPGGRGPEDSWLLLSAPGPTPASPRPASPCGKRRYSSSGTPSSASPALSRRGSLGEEGSEPPPPPPLPLARDPGSPGPFDYVGAPPAESIPQKTRRTSSEQAVALPRSEEPASCNGKLPLGAEESVAPPGGSRKEVAGMDYLAVPSPLAWSKARIGGHSPIF

SEQ ID NO: 7195 - DNA, 713 bp, Homo sapiens
gcctgtcctcgtggagcttcttctccgatgcctctgacgaggcagccctgtatgcagcctgcgacgaggtggagtctgagctaaatgaggcggcctcccgctttggcctgggctccccgctgccctcgccccgggcctcccctcggccatggacccccgaagatccctggagcctgtatggtccaagccccggaggccgagggccagaggatagctggctactcctcagtgctcctgggcccaccccagcctccccgcggcctgcctctccatgtggcaagcggcgctattccagctcgggaaccccatcttcagcctccccagctctgtcccgccgtggcagcctgggggaagaggggtctgagccacctccaccacccccattgcctctggcccgggacccgggctcccctggtccctttgactatgtgggggccccaccagctgagagcatccctcagaagacacggcggacttccagcgagcaggcagtggctctgcctcggtctgaggagcctgcctcatgcaatgggaagctgcccttgggagcagaggagtctgtggctcctccaggaggttcccggaaggaggtggactgccattcatgcattgtcagatatttattaaacagcagcaaagtgccagccaatttgtcctggaggaattcatagcctcatggggcaaaagtaaataaacagcttattacaattcaa

SEQ ID NO: 7196 - protein, 180 aa, Homo sapiens
MRRPPALAWAPRCPRPGPPLGHGPPKIPGACMVQAPEAEGQRIAGYSSVLLGPPQPPRGLPLHVASGAIPAREPHLQPPQLCPAVAAWGKRGLSHLHHPHCLWPGTRAPLVPLTMWGPHQLRASLRRHGGLPASRQWLCLGLRSLPHAMGSCPWEQRSLWLLQEVPGRRWTAIHALSDIY

SEQ ID NO: 7197 - DNA, 911 bp, Homo sapiens
aggtgggtgtgggactgggggctgtgagtgtgagtgtgtgcaagagattgctctgcatgtttgctgagggctggagctgggcttttcagagatcgggcatccctggtctctcagggccagttggaggttcccaggaggcatgttcttgatgcctgtggctgcctgaatccaattaactgaattctgaagagtgcatggggtaactgtctcagcctttctcctgtctctgcctctgtcctctgctccaaatcataaaatctcagagctagaagcactttcaagatcattccatccagcgcattcaatttgcaagtttaggcgttgagttccagagagggatggtagcttgctgaggtcccagtcaagcacacttgccattgcctcagctttcccctaaacacggtgtctgtggtcagggttggtgaggaggagctttcctgttttgcctctccttcttcccattggctacacccatctctggccctgctgataccgattcccctgacatttcaggctaagccagcaggaaagggctaggacgggtgcctgggagcccacatggagggagttgggcaagatttgattcggagcaggtgtcaagacgtgttggggaaactgaggcccagtggaatagaagccagtagaggaggaatctagaggcctcctagattaagacctgcctggaatggattgggggtgggtctttggaaaaggaggggacccacctctagcccagtctctcaactgcccctcctttacagtgagtgagatcattggccgagacctgagtggcttccctgcacctcctggagaagagcctcctgcctgaaccacgtgaactgtcatcacctggctgttgtgctggaaagctggggacaggttgatggtaataaactgctcaatgaccagtg

SEQ ID NO: 7198 - protein, 47 aa, Homo sapiens
MDWGWVFGKGGDPPLAQSLNCPSFTVSEIIGRDLSGFPAPPGEEPPA

SEQ ID NO: 7199 - DNA, 7857 bp, Homo sapiens
ctgggcccaaaacttgggtggaaggcagaggcctccgggaccctccccgccccctcctcccccccgccggctcccccgccctctcctccgcgcccctttaagctatccagcagacggagacagagttgatccaggaggggctggcagagtgctggagggggaaggctgggggcggagggaagggcggcaggagcccgaccggtcccacccctagctacaaccccgggcaggaagagctcgtcgcggtagcagcggtcgaaggggaccaagctccagagggcgggcgcccgagccgtgcggggagcgggcggggcagccatgctcctgtctgggggcgatcctccggcgcaggaatggttcatggtgcagacaaaatcgaagcctcgggtgcagcggcagcggctgcaagtgcagcgcatctttagggtcaagctgaacgccttccagagccgcccggacaccccctacttctggctacagctcgaggggccccgagagaacatgggcaaagccaaggaatacctgaagggcctgtgcagcccagagctgtggaaagaggttcgctacccaccgatcctgcactgtgccttccttggggcccaaggcctcttcctggactgcctctgctggagcacccttgcctacctggtgcctggcccccctggctccctgatggtgggcgggctgactgagtctttcatcatgacacagaactggctggaggagctggtggggcgactgcgctggggccctgcccctctgctgaccccccgggggatctgggaggctgaggtgacccgggcctttggggccctggtctggatccgtggtgaccagcatgcaggggacctactgcagctgcccccagcggtccaggagctgctgctgagcctggtgcgggatgctgcgggcaaggaagacatcatcgagtggctcagccgcttcggcatctctgactcccactccgatccggaggttctaatctgccctccccagcagcagaaggaagccccagccatggtgtccgtgggagagagtcctggaccctttgtggacatggggaccctccagaacaggggcccagaaaattcaaagagattatctagcctgggagccactgggtccctgatcacagcccagagcacaccgcaggaggcagcaaaccagctggtacgggtcggttccaacaaccaagatggtatggacagtgctcaagaggaagggacagtgcaagccaccagcagccaggactccacgaaccacacacaagccttgttgaagcaaaggcaggtccagaagatagaagataaactcctcttccaacctccagtatcagccctgggtgtgtgcccaccctggaaggcctggaccccggggccagcctttgggccattgtggccgggggctattgctgcaaccttctggaggatcaatgagctgcattctctacatctggcctggctcctgtcccaggcgtgcttcaatttccccttctggcagagacctctgggccccattcagttgaagctgccagggcagaatcctttgcccttaaatctggagtggaagcagaaggagctggctcctctgcctagtgcagaaagcccagctggtagaccagatggggggctgggaggagaagcagccctgcagaattgcccaaggccagagatttccccaaaagttacgagtttattggtggtccctgggagctcagatgtaaaagacaaagttagctcggatctcccacagatagggccacccttgacctctacaccccaactacaggctggaggtgagccgggggatcaagggagtatgcagttagattttaagggactggaagagggacccgctccagtgctgccaacagggcaagggaagcccgtggctcaaggggggctgacagatcagtcagtacctggagctcaaacagtgcctgaaactctcaaagtgcccatggctgcagcagtgcccaaagctgaaaatccctccagaactcaagtgccatctgcagctcccaaactgcctacatctcgaatgatgctggcagtgcacacagagcctgcagctcccgaagtgcctttggctccaacaaagccaacagctcaactgatggccacagctcaaaaaacagttgtgaatcaaccagtgttggtagctcaagtggaacccacaactccaaaaactccccaggctcagaagatgcctgtagcaaaaacatcacctgcaggtcccaaaacacccaaagctcaagccgggcctgcagctacagtttccaaagcacctgcagcttccaaagcacctgcagctcccaaagtacctgtgacccccagagtctccagagctcccaaaacacctgcagctcagaaggtgcccacggatgcagggccaaccttggatgtagccagacttctgagtgaggtccagcctacatcaagggctagtgtctccttactgaagggccaggggcaggctggaaggcagggtccccagtccagtggcaccttggccctcagcagtaagcaccagtttcagatggaggggctcctgggggcttgggagggggccccaaggcagccacctcgccacctgcaagcgaacagcacagtgaccagcttccagaggtaccacgaggccctgaatacacccttcgagctgaacctgtcaggggaacctggaaaccaggggttgcggcgagtggtcatcgatggcagcagtgtggccatggtgcatggcctgcagcacttcttctcctgccgaggaattgccatggcagtgcagtttttctggaaccggggacaccgagaggtcactgtgtttgtacccacctggcagctgaagaagaaccggagggtgagagagagccactttctgacgaagctacactcgctcaagatgctttcaatcacaccctcccagcttgagaatggcaagaagatcaccacctacgattataggttcatggtaaagctggcagaggagacagatggcatcattgtcaccaatgagcagattcacatcctgatgaatagttccaagaaactgatggtcaaagatcgcttgctgcctttcacctttgcggggaatctcttcatggtgcctgatgaccccctgggccgtgatggccccaccttggatgagtttctgaagaagccaaacaggttggacactgacattggcaacttcctgaaggtgtggaagacccttcctcccagctcagccagtgtcactgagctgagtgatgacgctgactctgggcccctggagagtctgccgaatatggaagaagtcagggaagagaaggaggagaggcaggatgaggagcagagacaggggcagggcacacagaaggcggctgaggaggacgaccttgactcttcgctggcgtcagtgttcagggtggagtgcccgtccctttcggaggagatcctgcggtgcctcagcctccatgatccccctgatggggccctggacatcgacctcctgccaggggcagcttctccctacctgggcatcccctgggatggaaaggctccctgccagcaggttcttgcccacctggcccagctcaccatccccagcaacttcaccgcactctccttcttcatgggcttcatggactcccacagggatgccatccctgactatgaagccctagtgggccccctgcacagcctcctcaagcagaagcctgactggcagtgggaccaggagcatgaggaggccttcctggccctgaagcgagccctggtgtctgccctctgcctgatggcccccaactcccagctgcccttccgcctggaggtgaccgtgagccacgtggccctgacggccatcctccatcaggagcactcagggaggaagcaccccatagcctatacctcaaaacccctcctccctgatgaggagagccagggcccccagtcagggggtgacagcccctatgctgtggcctgggccctcaagcatttttcccgctgcattggagacaccccggtggtcctggacctttcctatgcctcccggaccactgcggaccctgaggtgcgggagggccgcagggtttccaaagcttggttgatccgatggtccctcttggttcaggacaaaggcaagagggccctggaattggccctcctccagggcctgctgggggagaaccgcctgctcacccccgcggcctccatgcctcgcttcttccaggttctgccgcctttctctgacctgtccacgttcgtctgcatccacatgtcgggctactgcttctaccgtgaggatgagtggtgtgctggctttggtctctatgttctatcgcccaccagcccccctgtctccctttccttctcctgctccccttacacgccaacctatgcccacctggcagccgtggcctgcggcctggagcgctttggccagtccccactcccagtggttttcctcactcactgcaactggatcttcagcctcctgtgggagctcctgcccctctggagggctcggggcttcctctcctctgatggggctccactccctcacccaagcctgctctcctacattatatccctcacctctggcctctcatcccttccgtttatctaccgaacctcctaccggggctctctgtttgctgtgacagtggacaccctggccaagcagggtgcccaggggggtgggcagtggtggagtttgccaaaggatgtgccagcccctacagtgagtccccatgccatgggcaagaggcccaatttgctggcattacagctgagtgacagcaccctggccgacatcattgccaggctgcaggctgggcagaaactgtctggctcctcaccgtttagttctgcctttaactcactcagcctcgacaaggagagtggcctgcttatgttcaagggagataagaagcccagggtctgggtagtcccgacgcaactccggagggatctgattttctctgtgcatgacattcccttgggggcccaccagaggcccgaagagacctacaagaagttgcgtttgctggggtggtggcctgggatgcaggagcatgtgaaagattactgcaggagctgcttgttctgcatcccccgaaatctcataggcagcgagttgaaggttattgagtccccatggcccctcaggtcgaccgccccctggtcgaacctgcagatcgaggtggtgggcccggtcaccataagtgaggagggccataagcatgtacttattgtggctgacccaaacaccaggtgggtggaggcattccccctgaagccctacacacacacggctgtggcccaggtgctgcttcagcatgtgtttgcaaggtggggtgttcctgtgaggctggaggcagcccaggggccccagtttgcccggcacgtccttgtgagctgtgggctggccctgggagcccaggtggcctccctgagtcgggacctccagttcccctgcctgacgagctcaggggcctactgggaattcaagagggccctcaaggagttcatcttcctgcatgggaagaagtgggcggcctccctgcctttgctgcacctggccttcagggcctcctccactgatgccacaccgttcaaggtcctgaccgggggtgagtcaaggctcacggagcccctgtggtgggagatgagcagcgcaaacattgaagggctcaagatggacgtcttcctgctacagctggtgggggagctgctggagctccactggagggtggctgacaaggcgagtgaaaaggccgagaacaggcgtttcaagcgggagagccaggagaaggagtggaatgtgggtgaccaggtccttttgctgtccctccccaggaatggcagcagtgccaaatgggtgggtcccttctatatcggggaccggctgagcctgtcactctataggatatggggcttcccaaccccagagaagctggggtgcatctatcccagcagtctgatgaaggcctttgccaagagtggcaccccgctgtccttcaaggtcttggagcagtgagcgggagcagcgggggtgccccctgccccagggccgtgggtttctgctgctaggcctccccctgtcccagcagtgctctcagtccactgggggccctcagttgtgccttttgtagagaacttgcttcataaagctttgctgaattgccttgaactagggaccagcatccccatggaaacatccccagtttggggtacttggagaatttgccaaaggctgtcagatatgggtccctggcagttttacactgggaaatggagtgctcctctaggctataccaggctcagtgtcttctccccaagtatcctctttccccttcacatgtaggtgtgtggtggtgtgcacacacactcacgaaagaatctatcttggccatgaaactgtggctgttgaccttggaattggaaccacagtcctttcccatacagaaaccccaaatgtgggctcctccctccaacctgttcttttggggaccctttgcccttagagctgtcacagatgacataagcctgggcaggctgtggggaggccgctgcctcctagcctcacggtcagctttctcaagccaggtgtggcctgcacagctctcagggcagggctggccatcctcccaggcctcaagggcagtgtcttggagtgggaggatggccagccacaagccaccagcttgtcagcatgggaagggcaagggggaaatgggttggcctacctcatttgactccagccaatggagacaattcctgacccctgctttgatggtgttgaccccacaggaatcaaggatcttgatgccaagtgtggcatctctatctgaagagctgcttctgttagacccaggggccccggcctctgttttaagggggcagggcgtctgcaacaggagtggcacacggtgaagtgctggcatggctctacctcccaacccctcccaaccccatcccaaagcctacagtcctctgctccttctacctccactgtatcctgcatcccagaccctacagattgtgtgattgcttcatctgtatcaccccccgagtcctgtggacctgccttctgtgtagagcaaaacccaggctccctcacagccattctttgcagagatcacccttgcagtgagtgtgagttccttccaggtgtgtgcgcgtacactcaccctctgaattgctgccgctgccaaggaagtgggctccaggtgaaggccagtgccacgtcactctggctggccttcttagtagtttcatttctccggaagctgagccagtctcctggtctagcccaggttgccagaacgcttggcattgcagagtgctagagccagtggagaacttgccaacttgattgttttacagcagaggaaagaggatcacagagggaaaatgattcacccaaagtcacacagcaagttcatggctgagctgagaccaggattaagcttcctgactcccagttcaccatgaaaagggttctggcaacaggttcaagctggagaatccttcaaaatgctacacccacattctctccaactcttcatctccctgatcttccagacaaactacctggatgttgcccttaaaccatttctagctgttaaccctgtccagaaaaatgattgagtgatagctgagaagtggaaagtgtgggatttttggcaggtgctctctttcctccgccccccgcgccattctttctcttcctcctctctgtaatggtatgtccagcctcactctccctccctggtgctgtatgcgttccccctgttagctacatttgtgatcacatacccttcttttaagtgaatttttttcatttgatttgtcaataaacgaatcaaactggagctga

SEQ ID NO: 7200 - protein, 1898 aa, Homo sapiens; identical to SEQ ID NO: 990

SEQ ID NO: 7201 - DNA, 1915 bp, Homo sapiens
gctacaaccccgggcaggaagagctcgtcgcggtagcagcggtcgaaggggaccaagctccagagggcgggcgcccgagccgtgcggggagcgggcggggcagccatgctcctgtctgggggcgatccttctcctgctccccttacacgccaacctatgcccacctggcagccgtggcctgcggcctggagcgctttggccagtccccactcccagtggttttcctcactcactgcaactggatcttcagcctcctgtgggagctcctgcccctctggagggctcggggcttcctctcctctgatggggctccactccctcacccaagcctgctctcctacattatatccctcacctctggcctctcatcccttccgtttatctaccgaacctcctaccggggctctctgtttgctgtgacagtggacaccctggccaagcagggtgcccaggggggtgggcagtggtggagtttgccaaaggatgtgccagcccctacagtgagtccccatgccatgggcaagaggcccaatttgctggcattacagctgagtgacagcaccctggccgacatcattgccaggctgcaggctgggcagaaactgtctggctcctcaccgtttagttctgcctttaactcactcagcctcgacaaggagagtggcctgcttatgttcaagggagataagaagcccagggtctgggtagtcccgacgcaactccggagggatctgattttctctgtgcatgacattcccttgggggcccaccagaggcccgaagagacctacaagaagttgcgtttgctggggtggtggcctgggatgcaggagcatgtgaaagattactgcaggagctgcttgttctgcatcccccgaaatctcataggcagcgagttgaaggttattgagggccccggcctctgttttaagggggcagggcgtctgcaacaggagtggcacacggtgaagtgctggcatggctctacctcccaacccctcccaaccccatcccaaagcctacagtcctctgctccttctacctccactgtatcctgcatcccagaccctacagattgtgtgattgcttcatctgtatcaccccccgagtcctgtggacctgccttctgtgtagagcaaaacccaggctccctcacagccattctttgcagagatcacccttgcagtgagtgtgagttccttccaggtgtgtgcgcgtacactcaccctctgaattgctgccgctgccaaggaagtgggctccaggtgaaggccagtgccacgtcactctggctggccttcttagtagtttcatttctccggaagctgagccagtctcctggtctagcccaggttgccagaacgcttggcattgcagagtgctagagccagtggagaacttgccaacttgattgttttacagcagaggaaagaggatcacagagggaaaatgattcacccaaagtcacacagcaagttcatggctgagctgagaccaggattaagcttcctgactcccagttcaccatgaaaagggttctggcaacaggttcaagctggagaatccttcaaaatgctacacccacattctctccaactcttcatctccctgatcttccagacaaactacctggatgttgcccttaaaccatttctagctgttaaccctgtccagaaaaatgattgagtgatagctgagaagtggaaagtgtgggatttttggcaggtgctctctttcctccgccccccgcgccattctttctcttcctcctctctgtaatggtatgtccagcctcactctccctccctggtgctgtatgcgttccccctgttagctacatttgtgatcacatacccttcttttaagtgaatttttttcatttgatttgtcaataaacgaatcaaactggagctga

SEQ ID NO: 7202 - protein, 289 aa, Homo sapiens
MGKRPNLLALQLSDSTLADIIARLQAGQKLSGSSPFSSAFNSLSLDKESGLLMFKGDKKPRVWVVPTQLRRDLIFSVHDIPLGAHQRPEETYKKLRLLGWWPGMQEHVKDYCRSCLFCIPRNLIGSELKVIEGPGLCFKGAGRLQQEWHTVKCWHGSTSQPLPTPSQSLQSSAPSTSTVSCIPDPTDCVIASSVSPPESCGPAFCVEQNPGSLTAILCRDHPCSECEFLPGVCAYTHPLNCCRCQGSGLQVKASATSLWLAFLVVSFLRKLSQSPGLAQVARTLGIAEC

SEQ ID NO: 7203 - DNA, 427 bp, Homo sapiens
ccctccccagcagcagaaggaagccccagccatggtgtccgtgggagagagtcctggaccctttgtggacatggggaccctccagaacaggggcccagaaaattcaaagagattatctagcctgggagccactgggtccctgatcacagcccagagcacaccgcaggaggcagcaaaccagctggtacgggtcggttccaacaaccaagatggtatggacagtgctcaagaggaagggacagtgcaagccaccagcagccaggactccacgaaccacacacaagccttgttgaagcaaaggcaggtccacctcactctccctccctggtgctgtatgcgttccccctgttagctacatttgtgatcacatacccttcttttaagtgaatttttttcatttgatttgtcaataaacgaatcaaactgg

SEQ ID NO: 7204 - protein, 106 aa, Homo sapiens
MVSVGESPGPFVDMGTLQNRGPENSKRLSSLGATGSLITAQSTPQEAANQLVRVGSNNQDGMDSAQEEGTVQATSSQDSTNHTQALLKQRQVHLTLPPWCCMRSPC

SEQ ID NO: 7205 - DNA, 2089 bp, Homo sapiens
tgaagggctcaagatggacgtcttcctgctacagctggtgggggagctgctggagctccactggagggtggctgacaaggcgagtgaaaaggccgagaacaggcgtttcaagcgggagagccaggagaaggagtggaatgtgggtgaccaggtccttttgctgtccctccccaggaatggcagcagtgccaaatgggtgggtcccttctatatcggggaccggctgagcctgtcactctataggatatggggcttcccaaccccagagaagctggggtgcatctatcccagcagtctgatgaaggcctttgccaagagtggcaccccgctgtccttcaaggtcttggagcagtgagcgggagcagcgggggtgccccctgccccagggccgtgggtttctgctgctaggcctccccctgtcccagcagtgctctcagtccactgggggccctcagttgtgccttttgtagagaacttgcttcataaagctttgctgaattgccttgaactagggaccagcatccccatggaaacatccccagtttggggtacttggagaatttgccaaaggctgtcagatatgggtccctggcagttttacactgggaaatggagtgctcctctaggctataccaggctcagtgtcttctccccaagtatcctctttccccttcacatgtaggtgtgtggtggtgtgcacacacactcacgaaagaatctatcttggccatgaaactgtggctgttgaccttggaattggaaccacagtcctttcccatacagaaaccccaaatgtgggctcctccctccaacctgttcttttggggaccctttgcccttagagctgtcacagatgacataagcctgggcaggctgtggggaggccgctgcctcctagcctcacggtcagcagcttgtcagcatgggaagggcaagggggaaatgggttggcctacctcatttgactccagccaatggagacaattcctgacccctgctttgatggtgttgaccccacaggaatcaaggatcttgatgccaagtgtggcatctctatctgaagagctgcttctgttagacccaggggccccggcctctgttttaagggggcagggcgtctgcaacaggagtggcacacggtgaagtgctggcatggctctacctcccaacccctcccaaccccatcccaaagcctacagtcctctgctccttctacctccactgtatcctgcatcccagaccctacagattgtgtgattgcttcatctgtatcaccccccgagtcctgtggacctgccttctgtgtagagcaaaacccaggctccctcacagccattctttgcagagatcacccttgcagtgagtgtgagttccttccaggtgtgtgcgcgtacactcaccctctgaattgctgccgctgccaaggaagtgggctccaggtgaaggccagtgccacgtcactctggctggccttcttagtagtttcatttctccggaagctgagccagtctcctggtctagcccaggttgccagaacgcttggcattgcagagtgctagagccagtggagaacttgccaacttgattgttttacagcagaggaaagaggatcacagagggaaaatgattcacccaaagtcacacagcaagttcatggctgagctgagaccaggattaagcttcctgactcccagttcaccatgaaaagggttctggcaacaggttcaagctggagaatccttcaaaatgctacacccacattctctccaactcttcatctccctgatcttccagacaaactacctggatgttgcccttaaaccatttctagctgttaaccctgtccagaaaaatgattgagtgatagctgagaagtggaaagtgtgggatttttggcaggtgctctctttcctccgccccccgcgccattctttctcttcctcctctctgtaatggtatgtccagcctcactctccctccctggtgctgtatgcgttccccctgttagctacatttgtgatcacatacccttcttttaagtgaatttttttcatttgatttgtcaataaacgaatcaaactggagctga

SEQ ID NO: 7206 - protein, 177 aa, Homo sapiens
MECSSRLYQAQCLLPKYPLSPSHVGVWWCAHTLTKESILAMKLWLLTLELEPQSFPIQKPQMWAPPSNLFFWGPFALRAVTDDISLGRLWGGRCLLASRSAACQHGKGKGEMGWPTSFDSSQWRQFLTPALMVLTPQESRILMPSVASLSEELLLLDPGAPASVLRGQGVCNRSGTR

SEQ ID NO: 7207 - DNA, 2988 bp, Homo sapiens
gcaccgcggcccccgctccccgctcccgggcgcggtggaggggcgcgcctaccgcctccgccgcccgcgccggcttcaggtcctctcagcgcccgccaggcccccgctttgcccgcgcccccagcccaggggacaagggcagggggcccgaatctgggcgggccttcccgggttcctcacccagcggggacctctcttgtccacatcgcacgcaaactgtttcttgagtcacttcctggcctggggcggagtcagcccagctcctcccggctgcgcgccctcctcccaaccccgccgccgcgcccagaggccccgacgggcccgctcggcctagtcccctcggcggctccagggctcgccccttgcgcttctcaccagccctcccgtctgtctcccggccctcagggtcctcgcgcattctgcgcagttacttctcggaaaggggaaccatgcgttgaaagttgtttcccgcgaataaagatgtggccgaccaaagaggcagcgtgactggcccactggtgctctaggcccaagcactttccaccaaagcaatcgtggcggagggggtaggcgggaggcgggaggcggagggtacccgtggtggagtacccctttcttccaacaaacggaaagatgccacgaagaagggctgttgatttgtgggggattttgaagagaggaagagtaggaggaaggggttgaggggctgcctctggcatatgcacacactcacacattctgtcacacccgtcacacacacataccatgttctccatccccccaggtccagccctcagtgctgtcccatccagcagggctgccctgaagctctggctgcagccctcccgtccagtgggcaggcggcttcatccctcctttctctcccaaagcccaactgctgtcactgcatgctctgccaaggaggagggaactgcagtgacagcaggagtaagagtgggaggcaggacagagctgggacacaggtatggagagggggttcagcgagcctagagagggcagacgatcagggtgccggcggtgagaatccagggagaggagcggaaacagaagaggggcagaagaccggggcacttgtgggttgcagagcccctcagccatgttgggagccaagccacactggctaccaggtcccctacacagtcccgggctgcccttggttctggtgcttctggccctgggggccgggtgggcccaggaggggtcagagcccgtcctgctggagggggagtgcctggtggtctgtgagcctggccgagctgctgcaggggggcccgggggagcagccctgggagaggcaccccctgggcgagtggcatttgctgcggtccgaagccaccaccatgagccagcaggggaaaccggcaatggcaccagtggggccatctacttcgaccaggtcctggtgaacgagggcggtggctttgaccgggcctctggctccttcgtagcccctgtccggggtgtctacagcttccggttccatgtggtgaaggtgtacaaccgccaaactgtccaggtgagcctgatgctgaacacgtggcctgtcatctcagcctttgccaatgatcctgacgtgacccgggaggcagccaccagctctgtgctactgcccttggaccctggggaccgagtgtctctgcgcctgcgtcgggggaatctactgggtggttggaaatactcaagtttctctggcttcctcatcttccctctctgaggacccaagtctttcaagcacaagaatccagcccctgacaactttcttctgccctctcttgccccagaaacagcagaggcaggagagagactccctctggctcctatcccacctctttgcatgggaccctgtgccaaacacccaagtttaagagaagagtagagctgtggcatctccagaccaggcctttccacccacccacccccagttaccctcccagccacctgctgcatctgttcctgcctgcagccctaggatcagggcaaggtttggcaagaaggaagatctgcactactttgcggcctctgctcctccggttcccccaccccagcttcctgctcaatgctgatcagggacaggtggcgcaggtgagcctgacaggcccccacaggagcccagatggacaagcctcagcgtaccctgcaggcttcttcctgtgaggaaagccagcatcacggatctcagccagcaccgtcagaagctgaaccagcaccgtatgggctagggtgggaggctcagccacaggcagaagggtgggaagggcctggagtctgtggctggtgaggaaggaaggagggtgtattgtctagactgaacatggtacacattctgcatgtatagcagagcagccagcaggtagcaatcctggctgtccttctatgctggatcccagatggactctggcccttacctccccacctgagattagggtgagtgtgtttgctctggctgagagcagagctgagagcaggtatacagagctggaagtggaccatggaaaacatcgataaccatgcatcctcttgcttggccacctcctgaaactgctccacctttgaagtttgaactttagtccctccacactctgactgctgcctccttcctcccagctctctcactgagttatcttcactgtacctgttccagcatatccccactatctctctttctcctgatctgtgctgtcttattctcctccttaggcttcctattacctgggattccatgattcattccttcagaccctctcctgccagtatgctaaaccctccctctctctttcttatcccgctgtcccattggcccagcctggatgaatctatcaataaaacaactagagaatggtggtcagtgagacactatagaattactaaggagaagatgcctctggagtttggatcgggtgttacaggtacaagtaggtatgttgcagaggaaaataaatatcaaactgtatactaaaattacatttt

SEQ ID NO: 7208 - protein, 235 aa, Homo sapiens
MHTLTHSVTPVTHTYHVLHPPRSSPQCCPIQQGCPEALAAALPSSGQAASSLLSLPKPNCCHCMLCQGGGNCSDSRSKSGRQDRAGTQVWRGGSASLERADDQGAGGENPGRGAETEEGQKTGALVGCRAPQPCWEPSHTGYQVPYTVPGCPWFWCFWPWGPGGPRRGQSPSCWRGSAWWSVSLAELLQGGPGEQPWERHPLGEWHLLRSEATTMSQQGKPAMAPVGPSTSTRSW

SEQ ID NO: 7209 - DNA, 1787 bp, Homo sapiens
gatgggggagagaaggcgttcaccttggctctgctggcgttttccttggggccctccagctgcagccagatgtgggggttgtccggacagtccttcggaaggacgctcacccccacgctgaagatgcgctccacatggggctgctgttcccgaaccttgttctcagcctccgcagacaccgcaaagcgatctggggacgcggggcgggccccccaggtcctggtgaacgagggcggtggctttgaccgggcctctggctccttcgtagcccctgtccggggtgtctacagcttccggttccatgtggtgaaggtgtacaaccgccaaactgtccaggtgagcctgatgctgaacacgtggcctgtcatctcagcctttgccaatgatcctgacgtgacccgggaggcagccaccagctctgtgctactgcccttggaccctggggaccgagtgtctctgcgcctgcgtcgggggaatctactgggtggttggaaatactcaagtttctctggcttcctcatcttccctctctgaggacccaagtctttcaagcacaagaatccagcccctgacaactttcttctgccctctcttgccccagaaacagcagaggcaggagagagactccctctggctcctatcccacctctttgcatgggaccctgtgccaaacacccaagtttaagagaagagtagagctgtggcatctccagaccaggcctttccacccacccacccccagttaccctcccagccacctgctgcatctgttcctgcctgcagccctaggatcagggcaaggtttggcaagaaggaagatctgcactactttgcggcctctgctcctccggttcccccaccccagcttcctgctcaatgctgatcagggacaggtggcgcaggtgagcctgacaggcccccacaggagcccagatggacaagcctcagcgtaccctgcaggcttcttcctgtgaggaaagccagcatcacggatctcagccagcaccgtcagaagctgaaccagcaccgtatgggctagggtgggaggctcagccacaggcagaagggtgggaagggcctggagtctgtggctggtgaggaaggaaggagggtgtattgtctagactgaacatggtacacattctgcatgtatagcagagcagccagcaggtagcaatcctggctgtccttctatgctggatcccagatggactctggcccttacctccccacctgagattagggtgagtgtgtttgctctggctgagagcagagctgagagcaggtatacagagctggaagtggaccatggaaaacatcgataaccatgcatcctcttgcttggccacctcctgaaactgctccacctttgaagtttgaactttagtccctccacactctgactgctgcctccttcctcccagctctctcactgagttatcttcactgtacctgttccagcatatccccactatctctctttctcctgatctgtgctgtcttattctcctccttaggcttcctattacctgggattccatgattcattccttcagaccctctcctgccagtatgctaaaccctccctctctctttcttatcccgctgtcccattggcccagcctggatgaatctatcaataaaacaactagagaatggtggtcagtgagacactatagaattactaaggagaagatgcctctggagtttggatcgggtgttacaggtacaagtaggtatgttgcagaggaaaataaatatcaaactgtatactaaaattacatttt

SEQ ID NO: 7210 - protein, 154 aa, Homo sapiens
MWGLSGQSFGRTLTPTLKMRSTWGCCSRTLFSASADTAKRSGDAGRAPQVLVNEGGGFDRASGSFVAPVRGVYSFRFHVVKVYNRQTVQVSLMLNTWPVISAFANDPDVTREAATSSVLLPLDPGDRVSLRLRRGNLLGGWKYSSFSGFLIFPL

SEQ ID NO: 7211 - DNA, 6230 bp, Homo sapiens
gggagagaaaggagggatgaagccgcctgcccactggacgggagggctgcagccagagcttcagggcagccctgctggatgggacagcactgagggctggacctggggggatggagaacatgggctgggggcagcagccatgcctacctggggggcccgccccgcgtccccagatcgctttgcggtgtctgcggaggctgagaacaaggttcgggaacagcagccccatgtggagcgcatcttcagcgtgggggtgagcgtccttccgaaggactgtccggacaacccccacatctggctgcagctggagggccccaaggaaaacgccagcagagccaaggagtacctgaagggcctctgcagcccagaactgcaggatgaaatccactacccgcccaaactgcactgcatctttctgggagcccagggcttcttccttgactgcctggcctggagcacgtcagcccatctggtgcccagggcgccaggctcactgatgatcagtggcctgactgaagcctttgtcatggctcagagccgggtagaagagctggcagagcggctgagctgggacttcacgccaggaccatcttccggagcctctcagtgtactggagtgctgagagacttctctgccctgctgcagtccccgggggatgcccatagagaggctctgttgcagttgcccctggctgtccaggaggagctgctgagtctggtgcaggaggcgtctagtgggcaggggccaggagcactggcttcttgggaggggcggagctcagccttgctgggtgctcagtgccaaggagtgagagctccccctagtgacggcagggagtccctggacactggatctatgggacccggagattgcaggggagcaaggggagacacttacgctgtggagaaggagggagggaaacagggtggtcccagggagatggattgggggtggaaggagttgcctggggaagaggcgtgggagagagaagtggccctcaggccacagtcagtgggtggaggggcaagggagtcagcacccctgaaagggaaggccctggggaaggaggagatagctctgggaggaggagggttctgtgtccaccgtgagcctcccggtgcccatggctcctgtcacagggcagctcagtcccgaggagcctccctcctccagcggctccacaatgggaatgcctctcctccgagggtgcccagccctccacctgcaccggaacccccatggcactgtggagaccggggtgactgcggagaccggggagacgtgggggacaggggagacaagcagcagggcatggcacggggtcgggggcctcaatggaaacgaggcgcccgagggggcaacttggtgactggcacacagcgtttcaaggaggccctgcaggatcctttcaccctgtgccttgccaatgtgcctggccagccagacctccgccatattgtcattgacggcagcaacgtggccatggtgcatggcctccagcactacttctccagccggggcattgccattgctgtgcagtacttctgggaccgtggtcaccgtgacataactgtctttgtgcctcagtggcgcttcagtaaggatgccaaagtcagagagagtcacttcctgcaaaagctgtattccctcagcctgctctccctcacaccctcacgagtcatggatggcaagaggatctcctcctatgatgacaggttcatggtgaagctggctgaagagacagatgggataattgtctccaatgaccagttccgggacctggcggaggagtctgagaagtggatggcaatcatcagagaacgcctgctgccctttacctttgtgggaaacctcttcatggtacctgatgacccactggggcgaaacggccccaccctggatgaatttctgaagaagccagccaggacacaggggtcttctaaggctcagcatccttccaggggctttgcagaacatggtaaacagcagcaggggagagaagaggaaaaaggtagtggtggcattcggaagacccgggaaacagagcggctccggcggcagctgctggaggtgttttggggtcaggatcacaaagtggacttcatcctgcagcgggagccatactgccgggacatcaaccaactgtctgaggccctgctcagtcttaacttttgagcctcacctgcttgagtggctgccgccctgtcagctccagccgcctccagctcagccctttctgtgagagtccctctgctgctcactctgatccagaggcaccctgagttggtgctttggatcagggaagccactttgggacaggtccataaagtgaactgatcttaccgagtcaggacctcagccagctctcaagaggttctgctcagccttaacttctcaactttgccttagcacagggtttctgtagggagtgggggctgctagaggggattagttccggagactgagactgttggctccacctccaagctgagctagggtggagggcagggtgggcaggaagtgacaggaagttaagctgttcctctccctggctgctgctctggatggccagagaacaagatgctcccttgctgagctcctgggagcgtggaaggagatgctaggccctggcacagtgttatgtggactgggccacgatagggtggagtgagctagtgaagaaggcagagggagacttggcttctggtctcagctatgcctgttttgtgaccttgattgagttgcttgggctttacttctgcctacaaatcaggggtaaaaatacctgttgggaggagaaatgagaacatagaggaaagcctcttggaggaaaggtgcttggaccaagtctcaggtgtgtctgcctgtggctgcacaggctctctaaccgaaacctcactttcagagagatgtgggtcctttgtctccaggatccacaccctagattttaacactgcattctcactataacgtgccctataatggctgcatcccttttgagcaacctccaaaatctacatttacacagtaggtaaattagggatgactgcattatcaaaatactctcagggttcctataaatggcagctctcctgttgtattcaggtgttgtttacagactaacaaatgtgttggcaaatccctggttagatgcacttcctggtgttgagatgaacacgtcgatttttcaccaatcgatgaagccatgctctgcaatgacaatattaatgtgatccgaccctaacattttctctatggaagacgtatgttgcataaagcaaggcacacttctgctttatgtgtgtgtgtatggggatgggaggacttaacggaagttgaaccagttggttctagatgaaccaattatctggaaaatgaaagaaccagagttggaaggcacttgactggccaccagaccaactctgctgttactgacatgctttcttcaccctgattcctagaggtcattgccctggatctgcttgaagtcctcctgtgccagggaatttactatctccagggtagcacattccctgtgtagacggtattaatcagtactccttactttagtgcagcctaaagtatgcttttctgttacatccacctttgaggctggtcatacctccaggaacaatacagagccagtcaacttcctggaatccaagaccagataaagaagtaggacaggtgcccctgggttctgttctgtgtgggcctgtggggagtctctagacaagatcttttccaggccctgacttctgcctccctctgagtggcacagggagttgaatactgcatggcgagtgtaatgatgatggggagggtccttgtgtcctcaccccttcctttttggtgatttacaccactgtaccatactgacccaggctgggggcaggtgtgttggagacaggctggtcaaagaggtgacaatgattaagagataacccagcggtccctgagaagagattggttagtatggcctgaactggtggctgggggaactgtgtctggtcaagttatggcagatgtcacagctttaggtaggtaaaaagggtcctagatgaaaaccttggagtttttttttttcctgatagggttgtttatacttcttgattggtttcttgccattttcactttcagtgatggtgggtgtgcagtagaccaaaagtgtcttctgcccttttgtgctaagggccctggttgactgagtggccccagtcagatgagaggcaagtcctaagcttcttatagacagggatgttgactttgttctgctgcagcctgataaactgggaccactgtgtggttagtaatgcacttgccatttggtgacacagactgaaggctatcctacacctgggccttacctcttcctctactggcatcctaatggcactctgacagcatccagggtgactacagggcccattggaaatggatcatcattctctcttctagtgtctatctttatcataacctgatgtcccaaacttgtgacaagttcttttggcaactgaaggaccaagaagggaaacggtgatgagagagactgctcattgtaactttcaaaaccccgtctttggggaagaatcatctagggtgacattccttgaagtaaatcccaggagaatctaggccaaagagatgagccaaggttagtgagacaatttatttttattgcctaaactgcagagcattctctacacagcgtaaaggagaagtggggcagctgcaggacatgtagagaaaccaaactgggaaatcttacaaggagttgaaaagattaatgtcccaacctgatgagattacggccttgagacaataaggtggagcaacagaacaatgggaaagaggactgggagaggaatctaagaaccagatggcttcagctctctagaggagctgagcctattcacagtgcctaacctggaagcctgtgaggaacaggcctcaggcccttgccacgacctacttaggctacaatttcctttaaggcagcccctagctctgggaaggaatactggtagccagtggccagtgttcgctgtgggatcaccttctggccctccagcagcatgatggcacgctgtcgcccaaagacagcttgcaccacagcgctggggagagggatgaaggctcggcggcccagggcagcacccaaggtctgggcaaactcagcattagtggcggaggatggagccactccattcaggaccccgtgcacgtggtttgcttcaagggcatgggtcaggattcctgccaggtccccgatgtgtatccaggggaagaattggtggcctgagccgatggggccccccaggcccaggcgaaagggcagcagcatgtggcccatggcaccacccccacggcccagcacaacccctagagcaggaaagagggaaggtacaggggtcctctcagccttgaaggagcccactgctcctcctggtttctgtttccccttcctcactctccccatgctgacttggctctgtaacagaagtgagcagtatggctgtctttaagacctcacaccttctcatctgcaggttggctagaagtggtggcatcctctcactctgtaattgtaatctcagctctcctaatcccatcacttccccagcccagagaagacattccaaccctgtctgatacccaggcccgtttctcacctgagcgcaccaccacctggcgtgtagaatctccaggaagcctggctgcagcttcccatttggttacgaggttggagaaaaagtcaaagtcccctcctgggctgtcttcatcatactccgcagtcagactgggctggtagtaagctgccggtggaacacaatcatttgccctgggtgtccttggtcctgcctggctctctgtagtggaggctccccttggcctcaccttctctggcccttaggatctccccatttggagacagagccatttggatattttccccttgaacttctccatgacctgaagcgttccttccctggaggaactctggttgcagggctaaacttagaggctgctagagtgtagtggttaagaacaggaacttgggtaccaggcgcctgaattttaatcagctccctcatttattaactctctgacttgatgcaagttacttaacctctctgtatagaattttcacatctttaaaatgggaataatagtacctacctcatagggttgttgtaaggaataaatgataataagcataaaacacttc

SEQ ID NO: 7212 - protein, 719 aa, Homo sapiens
MKPPAHWTGGLQPELQGSPAGWDSTEGWTWGDGEHGLGAAAMPTWGARPASPDRFAVSAEAENKVREQQPHVERIFSVGVSVLPKDCPDNPHIWLQLEGPKENASRAKEYLKGLCSPELQDEIHYPPKLHCIFLGAQGFFLDCLAWSTSAHLVPRAPGSLMISGLTEAFVMAQSRVEELAERLSWDFTPGPSSGASQCTGVLRDFSALLQSPGDAHREALLQLPLAVQEELLSLVQEASSGQGPGALASWEGRSSALLGAQCQGVRAPPSDGRESLDTGSMGPGDCRGARGDTYAVEKEGGKQGGPREMDWGWKELPGEEAWEREVALRPQSVGGGARESAPLKGKALGKEEIALGGGGFCVHREPPGAHGSCHRAAQSRGASLLQRLHNGNASPPRVPSPPPAPEPPWHCGDRGDCGDRGDVGDRGDKQQGMARGRGPQWKRGARGGNLVTGTQRFKEALQDPFTLCLANVPGQPDLRHIVIDGSNVAMVHGLQHYFSSRGIAIAVQYFWDRGHRDITVFVPQWRFSKDAKVRESHFLQKLYSLSLLSLTPSRVMDGKRISSYDDRFMVKLAEETDGIIVSNDQFRDLAEESEKWMAIIRERLLPFTFVGNLFMVPDDPLGRNGPTLDEFLKKPARTQGSSKAQHPSRGFAEHGKQQQGREEEKGSGGIRKTRETERLRRQLLEVFWGQDHKVDFILQREPYCRDINQLSEALLSLNF

SEQ ID NO: 7213 - DNA, 6398 bp, Homo sapiens
gggagagaaaggagggatgaagccgcctgcccactggacgggagggctgcagccagagcttcagggcagccctgctggatgggacagcactgagggctggacctggggggatggagaacatgggctgggggcagcagccatgcctacctggggggcccgccccgcgtccccagatcgctttgcggtgtctgcggaggctgagaacaaggttcgggaacagcagccccatgtggagcgcatcttcagcgtgggggtgagcgtccttccgaaggactgtccggacaacccccacatctggctgcagctggagggccccaaggaaaacgccagcagagccaaggagtacctgaagggcctctgcagcccagaactgcaggatgaaatccactacccgcccaaactgcactgcatctttctgggagcccagggcttcttccttgactgcctggcctggagcacgtcagcccatctggtgcccagggcgccaggctcactgatgatcagtggcctgactgaagcctttgtcatggctcagagccgggtagaagagctggcagagcggctgagctgggacttcacgccaggaccatcttccggagcctctcagtgtactggagtgctgagagacttctctgccctgctgcagtccccgggggatgcccatagagaggctctgttgcagttgcccctggctgtccaggaggagctgctgagtctggtgcaggaggcgtctagtgggcaggggccaggagcactggcttcttgggaggggcggagctcagccttgctgggtgctcagtgccaaggagtgagagctccccctagtgacggcagggagtccctggacactggatctatgggacccggagattgcaggggagcaaggggagacacttacgctgtggagaaggagggagggaaacagggtggtcccagggagatggattgggggtggaaggagttgcctggggaagaggcgtgggagagagaagtggccctcaggccacagtcagtgggtggaggggcaagggagtcagcacccctgaaagggaaggccctggggaaggaggagatagctctgggaggaggagggttctgtgtccaccgtgagcctcccggtgcccatggctcctgtcacagggcagctcagtcccgaggagcctccctcctccagcggctccacaatgggaatgcctctcctccgagggtgcccagccctccacctgcaccggaacccccatggcactgtggagaccggggtgactgcggagaccggggagacgtgggggacaggggagacaagcagcagggcatggcacggggtcgggggcctcaatggaaacgaggcgcccgagggggcaacttggtgactggcacacagcgtttcaaggaggccctgcaggatcctttcaccctgtgccttgccaatgtgcctggccagccagacctccgccatattgtcattgacggcagcaacgtggccatggtgcatggcctccagcactacttctccagccggggcattgccattgctgtgcagtacttctgggaccgtggtcaccgtgacataactgtctttgtgcctcagtggcgcttcagtaaggatgccaaagtcagagagagtcacttcctgcaaaagctgtattccctcagcctgctctccctcacaccctcacgagtcatggatggcaagaggatctcctcctatgatgacaggttcatggtgaagctggctgaagagacagatgggataattgtctccaatgaccagttccgggacctggcggaggagtctgagaagtggatggcaatcatcagagaacgcctgctgccctttacctttgtgggaaacctcttcatggtacctgatgacccactggggcgaaacggccccaccctggatgaatttctgaagaagccagccaggacacaggggtcttctaaggctcagcatccttccaggggctttgcagaacatggtaaacagcagcaggggagagaagaggaaaaaggtagtggtggcattcggaagacccgggaaacagagcggctccggcggcagctgctggaggtgttttggggtcaggatcacaaagtggacttcatcctgcagcgggagccatactgccgggacatcaaccaactgtctgaggccctgctcagtcttaacttttgagcctcacctgcttgagtggctgccgccctgtcagctccagccgcctccagctcagccctttctgtgagagtccctctgctgctcactctgatccagaggcaccctgagttggtgctttggatcagggaagccactttgggacaggtccataaagtgaactgatcttaccgagtcaggacctcagccagctctcaagaggttctgctcagccttaacttctcaactttgccttagcacagggtttctgtagggagtgggggctgctagaggggattagttccggagactgagactgttggctccacctccaagctgagctagggtggagggcagggtgggcaggaagtgacaggaagttaagctgttcctctccctggctgctgctctggatggccagagaacaagatgctcccttgctgagctcctgggagcgtggaaggagatgctaggccctggcacagtgttatgtggactgggccacgatagggtggagtgagctagtgaagaaggcagagggagacttggcttctggtctcagctatgcctgttttgtgaccttgattgagttgcttgggctttacttctgcctacaaatcaggggtaaaaatacctgttgggaggagaaatgagaacatagaggaaagcctcttggaggaaaggtgcttggaccaagtctcaggtgtgtctgcctgtggctgcacaggctctctaaccgaaacctcactttcagagagatgtgggtcctttgtctccaggatccacaccctagattttaacactgcattctcactataacgtgccctataatggctgcatcccttttgagcaacctccaaaatctacatttacacagtaggtaaattagggatgactgcattatcaaaatactctcagggttcctataaatggcagctctcctgttgtattcaggtgttgtttacagactaacaaatgtgttggcaaatccctggttagatgcacttcctggtgttgagatgaacacgtcgatttttcaccaatcgatgaagccatgctctgcaatgacaatattaatgtgatccgaccctaacattttctctatggaagacgtatgttgcataaagcaaggcacacttctgctttatgtgtgtgtgtatggggatgggaggacttaacggaagttgaaccagttggttctagatgaaccaattatctggaaaatgaaagaaccagagttggaaggcacttgactggccaccagaccaactctgctgttactgacatgctttcttcaccctgattcctagaggtcattgccctggatctgcttgaagtcctcctgtgccagggaatttactatctccagggtagcacattccctgtgtagacggtattaatcagtactccttactttagtgcagcctaaagtatgcttttctgttacatccacctttgaggctggtcatacctccaggaacaatacagagccagtcaacttcctggaatccaagaccagataaagaagtaggacaggtgcccctgggttctgttctgtgtgggcctgtggggagtctctagacaagatcttttccaggccctgacttctgcctccctctgagtggcacagggagttgaatactgcatggcgagtgtaatgatgatggggagggtccttgtgtcctcaccccttcctttttggtgatttacaccactgtaccatactgacccaggctgggggcaggtgtgttggagacaggctggtcaaagaggtgacaatgattaagagataacccagcggtccctgagaagagattggttagtatggcctgaactggtggctgggggaactgtgtctggtcaagttatggcagatgtcacagctttaggtaggtaaaaagggtcctagatgaaaaccttggagtttttttttttcctgatagggttgtttatacttcttgattggtttcttgccattttcactttcagtgatggtgggtgtgcagtagaccaaaagtgtcttctgcccttttgtgctaagggccctggttgactgagtggccccagtcagatgagaggcaagtcctaagcttcttatagacagggatgttgactttgttctgctgcagcctgataaactgggaccactgtgtggttagtaatgcacttgccatttggtgacacagactgaaggctatcctacacctgggccttacctcttcctctactggcatcctaatggcactctgacagcatccagggtgactacagggcccattggaaatggatcatcattctctcttctagtgtctatctttatcataacctgatgtcccaaacttgtgacaagttcttttggcaactgaaggaccaagaagggaaacggtgatgagagagactgctcattgtaactttcaaaaccccgtctttggggaagaatcatctagggtgacattccttgaagtaaatcccaggagaatctaggccaaagagatgagccaaggttagtgagacaatttatttttattgcctaaactgcagagcattctctacacagcgtaaaggagaagtggggcagctgcaggacatgtagagaaaccaaactgggaaatcttacaaggagttgaaaagattaatgtcccaacctgatgagattacggccttgagacaataaggtggagcaacagaacaatgggaaagaggactgggagaggaatctaagaaccagatggcttcagctctctagaggagctgagcctattcacagtgcctaacctggaagcctgtgaggaacaggcctcaggcccttgccacgacctacttaggctacaatttcctttaaggcagcccctagctctgggaaggaatactggtagccagtggccagtgttcgctgtgggatcaccttctggccctccagcagcatgatggcacgctgtcgcccaaagacagcttgcaccacagcgctggggagagggatgaaggctcggcggcccagggcagcacccaaggtctgggcaaactcagcattagtggcggaggatggagccactccattcaggaccccgtgcacgtggtttgcttcaagggcatgggtcaggattcctgccaggtccccgatgtgtatccaggggaagaattggtggcctgagccgatggggccccccaggcccaggcgaaagggcagcagcatgtggcccatggcaccacccccacggcccagcacaacccctagagcaggaaagagggaaggtacaggggtcctctcagccttgaaggagcccactgctcctcctggtttctgtttccccttcctcactctccccatgctgacttggctctgtaacagaagtgagcagtatggctgtctttaagacctcacaccttctcatctgcaggttggctagaagtggtggcatcctctcactctgtaattgtaatctcagctctcctaatcccatcacttccccagcccagagaagacattccaaccctgtctgatacccaggcccgtttctcacctgagcgcaccaccacctggcgtgtagaatctccaggaagcctggctgcagcttcccatttggttacgaggttggagaaaaagtcaaagtcccctcctgggctgtcttcatcatactccgcagtcagactgggctggtagtaagctgccggtggaacacaatcatttgccctgggtgtccttggtcctgcctggctctctgtagtggaggctccccttggcctcaccttctctggcccttaggatctccccatttggagacagagccatttggatattttccccttgaacttctccatgacctgaagcgttccttccctggaggaactctggttgcagggctaaacttagaggctgctagagtgtagtggttaagaacaggaacttgggtaccaggcgcctgaattttaatcagctccctcatttattaactctctgacttgatgcaagttacttaacctctctgtatagaattttcacatctttaaaatgggaataatagtacctacctcatagggttgttgtaaggaataaatgataataagcataaaacacttcaaatagtggctggtgtgtataattgtttgcaattacttggtcccaaaggtgaccaggaactctgttcctaaagaactatggtgtgagaagtaagggactttgggataggtggacttttccctggcattgagtgatgccactccccactgttttttcagggtctcaatt

SEQ ID NO: 7214 - protein, 719 aa, Homo sapiens; identical to SEQ ID NO: 7212

SEQ ID NO: 7215 - DNA, 3219 bp, Homo sapiens
gaaacagtttgcgtgcgatgtggacaagagaggtccccgctggggctgggggcagcagccatgcctacctggggggcccgccccgcgtccccagatcgctttgcggtgtctgcggaggctgagaacaaggttcgggaacagcagccccatgtggagcgcatcttcagcgtgggggtgagcgtccttccgaaggactgtccggacaacccccacatctggctgcagctggagggccccaaggaaaacgccagcagagccaaggagtacctgaagggcctctgcagcccagaactgcaggatgaaatccactacccgcccaaactgcactgcatctttctgggagcccagggcttcttccttgactgcctggcctggagcacgtcagcccatctggtgcccagggcgccaggctcactgatgatcagtggcctgactgaagcctttgtcatggctcagagccgggtagaagagctggcagagcggctgagctgggacttcacgccaggaccatcttccggagcctctcagtgtactggagtgctgagagacttctctgccctgctgcagtccccgggggatgcccatagagaggctctgttgcagttgcccctggctgtccaggaggagctgctgagtctggtgcaggaggcgtctagtgggcaggggccaggagcactggcttcttgggaggggcggagctcagccttgctgggtgctcagtgccaaggagtgagagctccccctagtgacggcagggagtccctggacactggatctatgggacccggagattgcaggggagcaaggggagacacttacgctgtggagaaggagggagggaaacagggtggtcccagggagatggattgggggtggaaggagttgcctggggaagaggcgtgggagagagaagtggccctcaggccacagtcagtgggtggaggggcaagggagtcagcacccctgaaagggaaggccctggggaaggaggagatagctctgggaggaggagggttctgtgtccaccgtgagcctcccggtgcccatggctcctgtcacagggcagctcagtcccgaggagcctccctcctccagcggctccacaatgggaatgcctctcctccgagggtgcccagccctccacctgcaccggaacccccatggcactgtggagaccggggtgactgcggagaccggggagacgtgggggacaggggagacaagcagcagggcatggcacggggtcgggggcctcaatggaaacgaggcgcccgagggggcaacttggtgactggcacacagcgtttcaaggaggccctgcaggatcctttcaccctgtgccttgccaatgtgcctggccagccagacctccgccatattgtcattgacggcagcaacgtggccatggtgcatggcctccagcactacttctccagccggggcattgccattgctgtgcagtacttctgggaccgtggtcaccgtgacataactgtctttgtgcctcagtggcgcttcagtaaggatgccaaagtcagagagagtcacttcctgcaaaagctgtattccctcagcctgctctccctcacaccctcacgagtcatggatggcaagaggatctcctcctatgatgacaggttcatggtgaagctggctgaagagacagatgggataattgtctccaatgaccagttccgggacctggcggaggagtctgagaagtggatggcaatcatcagagaacgcctgctgccctttacctttgtgggaaacctcttcatggtacctgatgacccactggggcgaaacggccccaccctggatgaatttctgaagaagccagccaggacacaggggtcttctaaggctcagcatccttccaggggctttgcagaacatggtaaacagcagcaggggagagaagaggaaaaaggtagtggtggcattcggaagacccgggaaacagagcggctccggcggcagctgctggaggtgttttggggtcaggatcacaaagtggacttcatcctgcagcgggagccatactgccgggacatcaaccaactgtctgaggccctgctcagtcttaacttttgagcctcacctgcttgagtggctgccgccctgtcagctccagccgcctccagctcagccctttctgtgagagtccctctgctgctcactctgatccagaggcaccctgagttggtgctttggatcagggaagccactttgggacaggtccataaagtgaactgatcttaccgagtcaggacctcagccagctctcaagaggttctgctcagccttaacttctcaactttgccttagcacagggtttctgtagggagtgggggctgctagaggggattagttccggagactgagactgttggctccacctccaagctgagctagggtggagggcagggtgggcaggaagtgacaggaagttaagctgttcctctccctggctgctgctctggatggccagagaacaagatgctcccttgctgagctcctgggagcgtggaaggagatgctaggccctggcacagtgttatgtggactgggccacgatagggtggagtgagctagtgaagaaggcagagggagacttggcttctggtctcagctatgcctgttttgtgaccttgattgagttgcttgggctttacttctgcctacaaatcaggggtaaaaatacctgttgggaggagaaatgagaacatagaggaaagcctcttggaggaaaggtgcttggaccaagtctcaggtgtgtctgcctgtggctgcacaggctctctaaccgaaacctcactttcagagagatgtgggtcctttgtctccaggatccacaccctagattttaacactgcattctcactataacgtgccctataatggctgcatcccttttgagcaacctccaaaatctacatttacacagtaggtaaattagggatgactgcattatcaaaatactctcagggttcctataaatggcagctctcctgttgtattcaggtgttgtttacagactaacaaatgtgttggcaaatccctggttagatgcacttcctggtgttgagatgaacacgtcgatttttcaccaatcgatgaagccatgctctgcaatgacaatattaatgtgatccgaccctaacattttctctatggaagacgtatgttgcataaagcaaggcacacttctgcttt

SEQ ID NO: 7216 - protein, 678 aa, Homo sapiens; identical to SEQ ID NO: 992

SEQ ID NO: 7217 - DNA, 6151 bp, Homo sapiens
gaaacagtttgcgtgcgatgtggacaagagaggtccccgctggggctgggggcagcagccatgcctacctggggggcccgccccgcgtccccagatcgctttgcggtgtctgcggaggctgagaacaaggttcgggaacagcagccccatgtggagcgcatcttcagcgtgggggtgagcgtccttccgaaggactgtccggacaacccccacatctggctgcagctggagggccccaaggaaaacgccagcagagccaaggagtacctgaagggcctctgcagcccagaactgcaggatgaaatccactacccgcccaaactgcactgcatctttctgggagcccagggcttcttccttgactgcctggcctggagcacgtcagcccatctggtgcccagggcgccaggctcactgatgatcagtggcctgactgaagcctttgtcatggctcagagccgggtagaagagctggcagagcggctgagctgggacttcacgccaggaccatcttccggagcctctcagtgtactggagtgctgagagacttctctgccctgctgcagtccccgggggatgcccatagagaggctctgttgcagttgcccctggctgtccaggaggagctgctgagtctggtgcaggaggcgtctagtgggcaggggccaggagcactggcttcttgggaggggcggagctcagccttgctgggtgctcagtgccaaggagtgagagctccccctagtgacggcagggagtccctggacactggatctatgggacccggagattgcaggggagcaaggggagacacttacgctgtggagaaggagggagggaaacagggtggtcccagggagatggattgggggtggaaggagttgcctggggaagaggcgtgggagagagaagtggccctcaggccacagtcagtgggtggaggggcaagggagtcagcacccctgaaagggaaggccctggggaaggaggagatagctctgggaggaggagggttctgtgtccaccgtgagcctcccggtgcccatggctcctgtcacagggcagctcagtcccgaggagcctccctcctccagcggctccacaatgggaatgcctctcctccgagggtgcccagccctccacctgcaccggaacccccatggcactgtggagaccggggtgactgcggagaccggggagacgtgggggacaggggagacaagcagcagggcatggcacggggtcgggggcctcaatggaaacgaggcgcccgagggggcaacttggtgactggcacacagcgtttcaaggaggccctgcaggatcctttcaccctgtgccttgccaatgtgcctggccagccagacctccgccatattgtcattgacggcagcaacgtggccatggtgcatggcctccagcactacttctccagccggggcattgccattgctgtgcagtacttctgggaccgtggtcaccgtgacataactgtctttgtgcctcagtggcgcttcagtaaggatgccaaagtcagagagagtcacttcctgcaaaagctgtattccctcagcctgctctccctcacaccctcacgagtcatggatggcaagaggatctcctcctatgatgacaggttcatggtgaagctggctgaagagacagatgggataattgtctccaatgaccagttccgggacctggcggaggagtctgagaagtggatggcaatcatcagagaacgcctgctgccctttacctttgtgggaaacctcttcatggtacctgatgacccactggggcgaaacggccccaccctggatgaatttctgaagaagccagccaggacacaggggtcttctaaggctcagcatccttccaggggctttgcagaacatggtaaacagcagcaggggagagaagaggaaaaaggtagtggtggcattcggaagacccgggaaacagagcggctccggcggcagctgctggaggtgttttggggtcaggatcacaaagtggacttcatcctgcagcgggagccatactgccgggacatcaaccaactgtctgaggccctgctcagtcttaacttttgagcctcacctgcttgagtggctgccgccctgtcagctccagccgcctccagctcagccctttctgtgagagtccctctgctgctcactctgatccagaggcaccctgagttggtgctttggatcagggaagccactttgggacaggtccataaagtgaactgatcttaccgagtcaggacctcagccagctctcaagaggttctgctcagccttaacttctcaactttgccttagcacagggtttctgtagggagtgggggctgctagaggggattagttccggagactgagactgttggctccacctccaagctgagctagggtggagggcagggtgggcaggaagtgacaggaagttaagctgttcctctccctggctgctgctctggatggccagagaacaagatgctcccttgctgagctcctgggagcgtggaaggagatgctaggccctggcacagtgttatgtggactgggccacgatagggtggagtgagctagtgaagaaggcagagggagacttggcttctggtctcagctatgcctgttttgtgaccttgattgagttgcttgggctttacttctgcctacaaatcaggggtaaaaatacctgttgggaggagaaatgagaacatagaggaaagcctcttggaggaaaggtgcttggaccaagtctcaggtgtgtctgcctgtggctgcacaggctctctaaccgaaacctcactttcagagagatgtgggtcctttgtctccaggatccacaccctagattttaacactgcattctcactataacgtgccctataatggctgcatcccttttgagcaacctccaaaatctacatttacacagtaggtaaattagggatgactgcattatcaaaatactctcagggttcctataaatggcagctctcctgttgtattcaggtgttgtttacagactaacaaatgtgttggcaaatccctggttagatgcacttcctggtgttgagatgaacacgtcgatttttcaccaatcgatgaagccatgctctgcaatgacaatattaatgtgatccgaccctaacattttctctatggaagacgtatgttgcataaagcaaggcacacttctgctttatgtgtgtgtgtatggggatgggaggacttaacggaagttgaaccagttggttctagatgaaccaattatctggaaaatgaaagaaccagagttggaaggcacttgactggccaccagaccaactctgctgttactgacatgctttcttcaccctgattcctagaggtcattgccctggatctgcttgaagtcctcctgtgccagggaatttactatctccagggtagcacattccctgtgtagacggtattaatcagtactccttactttagtgcagcctaaagtatgcttttctgttacatccacctttgaggctggtcatacctccaggaacaatacagagccagtcaacttcctggaatccaagaccagataaagaagtaggacaggtgcccctgggttctgttctgtgtgggcctgtggggagtctctagacaagatcttttccaggccctgacttctgcctccctctgagtggcacagggagttgaatactgcatggcgagtgtaatgatgatggggagggtccttgtgtcctcaccccttcctttttggtgatttacaccactgtaccatactgacccaggctgggggcaggtgtgttggagacaggctggtcaaagaggtgacaatgattaagagataacccagcggtccctgagaagagattggttagtatggcctgaactggtggctgggggaactgtgtctggtcaagttatggcagatgtcacagctttaggtaggtaaaaagggtcctagatgaaaaccttggagtttttttttttcctgatagggttgtttatacttcttgattggtttcttgccattttcactttcagtgatggtgggtgtgcagtagaccaaaagtgtcttctgcccttttgtgctaagggccctggttgactgagtggccccagtcagatgagaggcaagtcctaagcttcttatagacagggatgttgactttgttctgctgcagcctgataaactgggaccactgtgtggttagtaatgcacttgccatttggtgacacagactgaaggctatcctacacctgggccttacctcttcctctactggcatcctaatggcactctgacagcatccagggtgactacagggcccattggaaatggatcatcattctctcttctagtgtctatctttatcataacctgatgtcccaaacttgtgacaagttcttttggcaactgaaggaccaagaagggaaacggtgatgagagagactgctcattgtaactttcaaaaccccgtctttggggaagaatcatctagggtgacattccttgaagtaaatcccaggagaatctaggccaaagagatgagccaaggttagtgagacaatttatttttattgcctaaactgcagagcattctctacacagcgtaaaggagaagtggggcagctgcaggacatgtagagaaaccaaactgggaaatcttacaaggagttgaaaagattaatgtcccaacctgatgagattacggccttgagacaataaggtggagcaacagaacaatgggaaagaggactgggagaggaatctaagaaccagatggcttcagctctctagaggagctgagcctattcacagtgcctaacctggaagcctgtgaggaacaggcctcaggcccttgccacgacctacttaggctacaatttcctttaaggcagcccctagctctgggaaggaatactggtagccagtggccagtgttcgctgtgggatcaccttctggccctccagcagcatgatggcacgctgtcgcccaaagacagcttgcaccacagcgctggggagagggatgaaggctcggcggcccagggcagcacccaaggtctgggcaaactcagcattagtggcggaggatggagccactccattcaggaccccgtgcacgtggtttgcttcaagggcatgggtcaggattcctgccaggtccccgatgtgtatccaggggaagaattggtggcctgagccgatggggccccccaggcccaggcgaaagggcagcagcatgtggcccatggcaccacccccacggcccagcacaacccctagagcaggaaagagggaaggtacaggggtcctctcagccttgaaggagcccactgctcctcctggtttctgtttccccttcctcactctccccatgctgacttggctctgtaacagaagtgagcagtatggctgtctttaagacctcacaccttctcatctgcaggttggctagaagtggtggcatcctctcactctgtaattgtaatctcagctctcctaatcccatcacttccccagcccagagaagacattccaaccctgtctgatacccaggcccgtttctcacctgagcgcaccaccacctggcgtgtagaatctccaggaagcctggctgcagcttcccatttggttacgaggttggagaaaaagtcaaagtcccctcctgggctgtcttcatcatactccgcagtcagactgggctggtagtaagctgccggtggaacacaatcatttgccctgggtgtccttggtcctgcctggctctctgtagtggaggctccccttggcctcaccttctctggcccttaggatctccccatttggagacagagccatttggatattttccccttgaacttctccatgacctgaagcgttccttccctggaggaactctggttgcagggctaaacttagaggctgctagagtgtagtggttaagaacaggaacttgggtaccaggcgcctgaattttaatcagctccctcatttattaactctctgacttgatgcaagttacttaacctctctgtatagaattttcacatctttaaaatgggaataatagtacctacctcatagggttgttgtaaggaataaatgataataagcataaaacacttc

SEQ ID NO: 7218 - protein, 678 aa, Homo sapiens; identical to SEQ ID NO: 992

SEQ ID NO: 7219 - DNA, 6319 bp, Homo sapiens
gaaacagtttgcgtgcgatgtggacaagagaggtccccgctggggctgggggcagcagccatgcctacctggggggcccgccccgcgtccccagatcgctttgcggtgtctgcggaggctgagaacaaggttcgggaacagcagccccatgtggagcgcatcttcagcgtgggggtgagcgtccttccgaaggactgtccggacaacccccacatctggctgcagctggagggccccaaggaaaacgccagcagagccaaggagtacctgaagggcctctgcagcccagaactgcaggatgaaatccactacccgcccaaactgcactgcatctttctgggagcccagggcttcttccttgactgcctggcctggagcacgtcagcccatctggtgcccagggcgccaggctcactgatgatcagtggcctgactgaagcctttgtcatggctcagagccgggtagaagagctggcagagcggctgagctgggacttcacgccaggaccatcttccggagcctctcagtgtactggagtgctgagagacttctctgccctgctgcagtccccgggggatgcccatagagaggctctgttgcagttgcccctggctgtccaggaggagctgctgagtctggtgcaggaggcgtctagtgggcaggggccaggagcactggcttcttgggaggggcggagctcagccttgctgggtgctcagtgccaaggagtgagagctccccctagtgacggcagggagtccctggacactggatctatgggacccggagattgcaggggagcaaggggagacacttacgctgtggagaaggagggagggaaacagggtggtcccagggagatggattgggggtggaaggagttgcctggggaagaggcgtgggagagagaagtggccctcaggccacagtcagtgggtggaggggcaagggagtcagcacccctgaaagggaaggccctggggaaggaggagatagctctgggaggaggagggttctgtgtccaccgtgagcctcccggtgcccatggctcctgtcacagggcagctcagtcccgaggagcctccctcctccagcggctccacaatgggaatgcctctcctccgagggtgcccagccctccacctgcaccggaacccccatggcactgtggagaccggggtgactgcggagaccggggagacgtgggggacaggggagacaagcagcagggcatggcacggggtcgggggcctcaatggaaacgaggcgcccgagggggcaacttggtgactggcacacagcgtttcaaggaggccctgcaggatcctttcaccctgtgccttgccaatgtgcctggccagccagacctccgccatattgtcattgacggcagcaacgtggccatggtgcatggcctccagcactacttctccagccggggcattgccattgctgtgcagtacttctgggaccgtggtcaccgtgacataactgtctttgtgcctcagtggcgcttcagtaaggatgccaaagtcagagagagtcacttcctgcaaaagctgtattccctcagcctgctctccctcacaccctcacgagtcatggatggcaagaggatctcctcctatgatgacaggttcatggtgaagctggctgaagagacagatgggataattgtctccaatgaccagttccgggacctggcggaggagtctgagaagtggatggcaatcatcagagaacgcctgctgccctttacctttgtgggaaacctcttcatggtacctgatgacccactggggcgaaacggccccaccctggatgaatttctgaagaagccagccaggacacaggggtcttctaaggctcagcatccttccaggggctttgcagaacatggtaaacagcagcaggggagagaagaggaaaaaggtagtggtggcattcggaagacccgggaaacagagcggctccggcggcagctgctggaggtgttttggggtcaggatcacaaagtggacttcatcctgcagcgggagccatactgccgggacatcaaccaactgtctgaggccctgctcagtcttaacttttgagcctcacctgcttgagtggctgccgccctgtcagctccagccgcctccagctcagccctttctgtgagagtccctctgctgctcactctgatccagaggcaccctgagttggtgctttggatcagggaagccactttgggacaggtccataaagtgaactgatcttaccgagtcaggacctcagccagctctcaagaggttctgctcagccttaacttctcaactttgccttagcacagggtttctgtagggagtgggggctgctagaggggattagttccggagactgagactgttggctccacctccaagctgagctagggtggagggcagggtgggcaggaagtgacaggaagttaagctgttcctctccctggctgctgctctggatggccagagaacaagatgctcccttgctgagctcctgggagcgtggaaggagatgctaggccctggcacagtgttatgtggactgggccacgatagggtggagtgagctagtgaagaaggcagagggagacttggcttctggtctcagctatgcctgttttgtgaccttgattgagttgcttgggctttacttctgcctacaaatcaggggtaaaaatacctgttgggaggagaaatgagaacatagaggaaagcctcttggaggaaaggtgcttggaccaagtctcaggtgtgtctgcctgtggctgcacaggctctctaaccgaaacctcactttcagagagatgtgggtcctttgtctccaggatccacaccctagattttaacactgcattctcactataacgtgccctataatggctgcatcccttttgagcaacctccaaaatctacatttacacagtaggtaaattagggatgactgcattatcaaaatactctcagggttcctataaatggcagctctcctgttgtattcaggtgttgtttacagactaacaaatgtgttggcaaatccctggttagatgcacttcctggtgttgagatgaacacgtcgatttttcaccaatcgatgaagccatgctctgcaatgacaatattaatgtgatccgaccctaacattttctctatggaagacgtatgttgcataaagcaaggcacacttctgctttatgtgtgtgtgtatggggatgggaggacttaacggaagttgaaccagttggttctagatgaaccaattatctggaaaatgaaagaaccagagttggaaggcacttgactggccaccagaccaactctgctgttactgacatgctttcttcaccctgattcctagaggtcattgccctggatctgcttgaagtcctcctgtgccagggaatttactatctccagggtagcacattccctgtgtagacggtattaatcagtactccttactttagtgcagcctaaagtatgcttttctgttacatccacctttgaggctggtcatacctccaggaacaatacagagccagtcaacttcctggaatccaagaccagataaagaagtaggacaggtgcccctgggttctgttctgtgtgggcctgtggggagtctctagacaagatcttttccaggccctgacttctgcctccctctgagtggcacagggagttgaatactgcatggcgagtgtaatgatgatggggagggtccttgtgtcctcaccccttcctttttggtgatttacaccactgtaccatactgacccaggctgggggcaggtgtgttggagacaggctggtcaaagaggtgacaatgattaagagataacccagcggtccctgagaagagattggttagtatggcctgaactggtggctgggggaactgtgtctggtcaagttatggcagatgtcacagctttaggtaggtaaaaagggtcctagatgaaaaccttggagtttttttttttcctgatagggttgtttatacttcttgattggtttcttgccattttcactttcagtgatggtgggtgtgcagtagaccaaaagtgtcttctgcccttttgtgctaagggccctggttgactgagtggccccagtcagatgagaggcaagtcctaagcttcttatagacagggatgttgactttgttctgctgcagcctgataaactgggaccactgtgtggttagtaatgcacttgccatttggtgacacagactgaaggctatcctacacctgggccttacctcttcctctactggcatcctaatggcactctgacagcatccagggtgactacagggcccattggaaatggatcatcattctctcttctagtgtctatctttatcataacctgatgtcccaaacttgtgacaagttcttttggcaactgaaggaccaagaagggaaacggtgatgagagagactgctcattgtaactttcaaaaccccgtctttggggaagaatcatctagggtgacattccttgaagtaaatcccaggagaatctaggccaaagagatgagccaaggttagtgagacaatttatttttattgcctaaactgcagagcattctctacacagcgtaaaggagaagtggggcagctgcaggacatgtagagaaaccaaactgggaaatcttacaaggagttgaaaagattaatgtcccaacctgatgagattacggccttgagacaataaggtggagcaacagaacaatgggaaagaggactgggagaggaatctaagaaccagatggcttcagctctctagaggagctgagcctattcacagtgcctaacctggaagcctgtgaggaacaggcctcaggcccttgccacgacctacttaggctacaatttcctttaaggcagcccctagctctgggaaggaatactggtagccagtggccagtgttcgctgtgggatcaccttctggccctccagcagcatgatggcacgctgtcgcccaaagacagcttgcaccacagcgctggggagagggatgaaggctcggcggcccagggcagcacccaaggtctgggcaaactcagcattagtggcggaggatggagccactccattcaggaccccgtgcacgtggtttgcttcaagggcatgggtcaggattcctgccaggtccccgatgtgtatccaggggaagaattggtggcctgagccgatggggccccccaggcccaggcgaaagggcagcagcatgtggcccatggcaccacccccacggcccagcacaacccctagagcaggaaagagggaaggtacaggggtcctctcagccttgaaggagcccactgctcctcctggtttctgtttccccttcctcactctccccatgctgacttggctctgtaacagaagtgagcagtatggctgtctttaagacctcacaccttctcatctgcaggttggctagaagtggtggcatcctctcactctgtaattgtaatctcagctctcctaatcccatcacttccccagcccagagaagacattccaaccctgtctgatacccaggcccgtttctcacctgagcgcaccaccacctggcgtgtagaatctccaggaagcctggctgcagcttcccatttggttacgaggttggagaaaaagtcaaagtcccctcctgggctgtcttcatcatactccgcagtcagactgggctggtagtaagctgccggtggaacacaatcatttgccctgggtgtccttggtcctgcctggctctctgtagtggaggctccccttggcctcaccttctctggcccttaggatctccccatttggagacagagccatttggatattttccccttgaacttctccatgacctgaagcgttccttccctggaggaactctggttgcagggctaaacttagaggctgctagagtgtagtggttaagaacaggaacttgggtaccaggcgcctgaattttaatcagctccctcatttattaactctctgacttgatgcaagttacttaacctctctgtatagaattttcacatctttaaaatgggaataatagtacctacctcatagggttgttgtaaggaataaatgataataagcataaaacacttcaaatagtggctggtgtgtataattgtttgcaattacttggtcccaaaggtgaccaggaactctgttcctaaagaactatggtgtgagaagtaagggactttgggataggtggacttttccctggcattgagtgatgccactccccactgttttttcagggtctcaatt

SEQ ID NO: 7220 - protein, 678 aa, Homo sapiens; identical to SEQ ID NO: 992

SEQ ID NO: 7221 - DNA, 3334 bp, Homo sapiens
tgcgatgtggacaagagaggtccccgctgggtgaggaacccgggaaggcccgcccagattcgggccccctgcccttgtcccctgggctgggggcgcgggcaaagcgggggcctggcgggcgctgagaggacctgaagccggcgcgggcggcggaggcgggctgggggcagcagccatgcctacctggggggcccgccccgcgtccccagatcgctttgcggtgtctgcggaggctgagaacaaggttcgggaacagcagccccatgtggagcgcatcttcagcgtgggggtgagcgtccttccgaaggactgtccggacaacccccacatctggctgcagctggagggccccaaggaaaacgccagcagagccaaggagtacctgaagggcctctgcagcccagaactgcaggatgaaatccactacccgcccaaactgcactgcatctttctgggagcccagggcttcttccttgactgcctggcctggagcacgtcagcccatctggtgcccagggcgccaggctcactgatgatcagtggcctgactgaagcctttgtcatggctcagagccgggtagaagagctggcagagcggctgagctgggacttcacgccaggaccatcttccggagcctctcagtgtactggagtgctgagagacttctctgccctgctgcagtccccgggggatgcccatagagaggctctgttgcagttgcccctggctgtccaggaggagctgctgagtctggtgcaggaggcgtctagtgggcaggggccaggagcactggcttcttgggaggggcggagctcagccttgctgggtgctcagtgccaaggagtgagagctccccctagtgacggcagggagtccctggacactggatctatgggacccggagattgcaggggagcaaggggagacacttacgctgtggagaaggagggagggaaacagggtggtcccagggagatggattgggggtggaaggagttgcctggggaagaggcgtgggagagagaagtggccctcaggccacagtcagtgggtggaggggcaagggagtcagcacccctgaaagggaaggccctggggaaggaggagatagctctgggaggaggagggttctgtgtccaccgtgagcctcccggtgcccatggctcctgtcacagggcagctcagtcccgaggagcctccctcctccagcggctccacaatgggaatgcctctcctccgagggtgcccagccctccacctgcaccggaacccccatggcactgtggagaccggggtgactgcggagaccggggagacgtgggggacaggggagacaagcagcagggcatggcacggggtcgggggcctcaatggaaacgaggcgcccgagggggcaacttggtgactggcacacagcgtttcaaggaggccctgcaggatcctttcaccctgtgccttgccaatgtgcctggccagccagacctccgccatattgtcattgacggcagcaacgtggccatggtgcatggcctccagcactacttctccagccggggcattgccattgctgtgcagtacttctgggaccgtggtcaccgtgacataactgtctttgtgcctcagtggcgcttcagtaaggatgccaaagtcagagagagtcacttcctgcaaaagctgtattccctcagcctgctctccctcacaccctcacgagtcatggatggcaagaggatctcctcctatgatgacaggttcatggtgaagctggctgaagagacagatgggataattgtctccaatgaccagttccgggacctggcggaggagtctgagaagtggatggcaatcatcagagaacgcctgctgccctttacctttgtgggaaacctcttcatggtacctgatgacccactggggcgaaacggccccaccctggatgaatttctgaagaagccagccaggacacaggggtcttctaaggctcagcatccttccaggggctttgcagaacatggtaaacagcagcaggggagagaagaggaaaaaggtagtggtggcattcggaagacccgggaaacagagcggctccggcggcagctgctggaggtgttttggggtcaggatcacaaagtggacttcatcctgcagcgggagccatactgccgggacatcaaccaactgtctgaggccctgctcagtcttaacttttgagcctcacctgcttgagtggctgccgccctgtcagctccagccgcctccagctcagccctttctgtgagagtccctctgctgctcactctgatccagaggcaccctgagttggtgctttggatcagggaagccactttgggacaggtccataaagtgaactgatcttaccgagtcaggacctcagccagctctcaagaggttctgctcagccttaacttctcaactttgccttagcacagggtttctgtagggagtgggggctgctagaggggattagttccggagactgagactgttggctccacctccaagctgagctagggtggagggcagggtgggcaggaagtgacaggaagttaagctgttcctctccctggctgctgctctggatggccagagaacaagatgctcccttgctgagctcctgggagcgtggaaggagatgctaggccctggcacagtgttatgtggactgggccacgatagggtggagtgagctagtgaagaaggcagagggagacttggcttctggtctcagctatgcctgttttgtgaccttgattgagttgcttgggctttacttctgcctacaaatcaggggtaaaaatacctgttgggaggagaaatgagaacatagaggaaagcctcttggaggaaaggtgcttggaccaagtctcaggtgtgtctgcctgtggctgcacaggctctctaaccgaaacctcactttcagagagatgtgggtcctttgtctccaggatccacaccctagattttaacactgcattctcactataacgtgccctataatggctgcatcccttttgagcaacctccaaaatctacatttacacagtaggtaaattagggatgactgcattatcaaaatactctcagggttcctataaatggcagctctcctgttgtattcaggtgttgtttacagactaacaaatgtgttggcaaatccctggttagatgcacttcctggtgttgagatgaacacgtcgatttttcaccaatcgatgaagccatgctctgcaatgacaatattaatgtgatccgaccctaacattttctctatggaagacgtatgttgcataaagcaaggcacacttctgcttt

SEQ ID NO: 7222 - protein, 678 aa, Homo sapiens; identical to SEQ ID NO: 992

SEQ ID NO: 7223 - DNA, 6266 bp, Homo sapiens
tgcgatgtggacaagagaggtccccgctgggtgaggaacccgggaaggcccgcccagattcgggccccctgcccttgtcccctgggctgggggcgcgggcaaagcgggggcctggcgggcgctgagaggacctgaagccggcgcgggcggcggaggcgggctgggggcagcagccatgcctacctggggggcccgccccgcgtccccagatcgctttgcggtgtctgcggaggctgagaacaaggttcgggaacagcagccccatgtggagcgcatcttcagcgtgggggtgagcgtccttccgaaggactgtccggacaacccccacatctggctgcagctggagggccccaaggaaaacgccagcagagccaaggagtacctgaagggcctctgcagcccagaactgcaggatgaaatccactacccgcccaaactgcactgcatctttctgggagcccagggcttcttccttgactgcctggcctggagcacgtcagcccatctggtgcccagggcgccaggctcactgatgatcagtggcctgactgaagcctttgtcatggctcagagccgggtagaagagctggcagagcggctgagctgggacttcacgccaggaccatcttccggagcctctcagtgtactggagtgctgagagacttctctgccctgctgcagtccccgggggatgcccatagagaggctctgttgcagttgcccctggctgtccaggaggagctgctgagtctggtgcaggaggcgtctagtgggcaggggccaggagcactggcttcttgggaggggcggagctcagccttgctgggtgctcagtgccaaggagtgagagctccccctagtgacggcagggagtccctggacactggatctatgggacccggagattgcaggggagcaaggggagacacttacgctgtggagaaggagggagggaaacagggtggtcccagggagatggattgggggtggaaggagttgcctggggaagaggcgtgggagagagaagtggccctcaggccacagtcagtgggtggaggggcaagggagtcagcacccctgaaagggaaggccctggggaaggaggagatagctctgggaggaggagggttctgtgtccaccgtgagcctcccggtgcccatggctcctgtcacagggcagctcagtcccgaggagcctccctcctccagcggctccacaatgggaatgcctctcctccgagggtgcccagccctccacctgcaccggaacccccatggcactgtggagaccggggtgactgcggagaccggggagacgtgggggacaggggagacaagcagcagggcatggcacggggtcgggggcctcaatggaaacgaggcgcccgagggggcaacttggtgactggcacacagcgtttcaaggaggccctgcaggatcctttcaccctgtgccttgccaatgtgcctggccagccagacctccgccatattgtcattgacggcagcaacgtggccatggtgcatggcctccagcactacttctccagccggggcattgccattgctgtgcagtacttctgggaccgtggtcaccgtgacataactgtctttgtgcctcagtggcgcttcagtaaggatgccaaagtcagagagagtcacttcctgcaaaagctgtattccctcagcctgctctccctcacaccctcacgagtcatggatggcaagaggatctcctcctatgatgacaggttcatggtgaagctggctgaagagacagatgggataattgtctccaatgaccagttccgggacctggcggaggagtctgagaagtggatggcaatcatcagagaacgcctgctgccctttacctttgtgggaaacctcttcatggtacctgatgacccactggggcgaaacggccccaccctggatgaatttctgaagaagccagccaggacacaggggtcttctaaggctcagcatccttccaggggctttgcagaacatggtaaacagcagcaggggagagaagaggaaaaaggtagtggtggcattcggaagacccgggaaacagagcggctccggcggcagctgctggaggtgttttggggtcaggatcacaaagtggacttcatcctgcagcgggagccatactgccgggacatcaaccaactgtctgaggccctgctcagtcttaacttttgagcctcacctgcttgagtggctgccgccctgtcagctccagccgcctccagctcagccctttctgtgagagtccctctgctgctcactctgatccagaggcaccctgagttggtgctttggatcagggaagccactttgggacaggtccataaagtgaactgatcttaccgagtcaggacctcagccagctctcaagaggttctgctcagccttaacttctcaactttgccttagcacagggtttctgtagggagtgggggctgctagaggggattagttccggagactgagactgttggctccacctccaagctgagctagggtggagggcagggtgggcaggaagtgacaggaagttaagctgttcctctccctggctgctgctctggatggccagagaacaagatgctcccttgctgagctcctgggagcgtggaaggagatgctaggccctggcacagtgttatgtggactgggccacgatagggtggagtgagctagtgaagaaggcagagggagacttggcttctggtctcagctatgcctgttttgtgaccttgattgagttgcttgggctttacttctgcctacaaatcaggggtaaaaatacctgttgggaggagaaatgagaacatagaggaaagcctcttggaggaaaggtgcttggaccaagtctcaggtgtgtctgcctgtggctgcacaggctctctaaccgaaacctcactttcagagagatgtgggtcctttgtctccaggatccacaccctagattttaacactgcattctcactataacgtgccctataatggctgcatcccttttgagcaacctccaaaatctacatttacacagtaggtaaattagggatgactgcattatcaaaatactctcagggttcctataaatggcagctctcctgttgtattcaggtgttgtttacagactaacaaatgtgttggcaaatccctggttagatgcacttcctggtgttgagatgaacacgtcgatttttcaccaatcgatgaagccatgctctgcaatgacaatattaatgtgatccgaccctaacattttctctatggaagacgtatgttgcataaagcaaggcacacttctgctttatgtgtgtgtgtatggggatgggaggacttaacggaagttgaaccagttggttctagatgaaccaattatctggaaaatgaaagaaccagagttggaaggcacttgactggccaccagaccaactctgctgttactgacatgctttcttcaccctgattcctagaggtcattgccctggatctgcttgaagtcctcctgtgccagggaatttactatctccagggtagcacattccctgtgtagacggtattaatcagtactccttactttagtgcagcctaaagtatgcttttctgttacatccacctttgaggctggtcatacctccaggaacaatacagagccagtcaacttcctggaatccaagaccagataaagaagtaggacaggtgcccctgggttctgttctgtgtgggcctgtggggagtctctagacaagatcttttccaggccctgacttctgcctccctctgagtggcacagggagttgaatactgcatggcgagtgtaatgatgatggggagggtccttgtgtcctcaccccttcctttttggtgatttacaccactgtaccatactgacccaggctgggggcaggtgtgttggagacaggctggtcaaagaggtgacaatgattaagagataacccagcggtccctgagaagagattggttagtatggcctgaactggtggctgggggaactgtgtctggtcaagttatggcagatgtcacagctttaggtaggtaaaaagggtcctagatgaaaaccttggagtttttttttttcctgatagggttgtttatacttcttgattggtttcttgccattttcactttcagtgatggtgggtgtgcagtagaccaaaagtgtcttctgcccttttgtgctaagggccctggttgactgagtggccccagtcagatgagaggcaagtcctaagcttcttatagacagggatgttgactttgttctgctgcagcctgataaactgggaccactgtgtggttagtaatgcacttgccatttggtgacacagactgaaggctatcctacacctgggccttacctcttcctctactggcatcctaatggcactctgacagcatccagggtgactacagggcccattggaaatggatcatcattctctcttctagtgtctatctttatcataacctgatgtcccaaacttgtgacaagttcttttggcaactgaaggaccaagaagggaaacggtgatgagagagactgctcattgtaactttcaaaaccccgtctttggggaagaatcatctagggtgacattccttgaagtaaatcccaggagaatctaggccaaagagatgagccaaggttagtgagacaatttatttttattgcctaaactgcagagcattctctacacagcgtaaaggagaagtggggcagctgcaggacatgtagagaaaccaaactgggaaatcttacaaggagttgaaaagattaatgtcccaacctgatgagattacggccttgagacaataaggtggagcaacagaacaatgggaaagaggactgggagaggaatctaagaaccagatggcttcagctctctagaggagctgagcctattcacagtgcctaacctggaagcctgtgaggaacaggcctcaggcccttgccacgacctacttaggctacaatttcctttaaggcagcccctagctctgggaaggaatactggtagccagtggccagtgttcgctgtgggatcaccttctggccctccagcagcatgatggcacgctgtcgcccaaagacagcttgcaccacagcgctggggagagggatgaaggctcggcggcccagggcagcacccaaggtctgggcaaactcagcattagtggcggaggatggagccactccattcaggaccccgtgcacgtggtttgcttcaagggcatgggtcaggattcctgccaggtccccgatgtgtatccaggggaagaattggtggcctgagccgatggggccccccaggcccaggcgaaagggcagcagcatgtggcccatggcaccacccccacggcccagcacaacccctagagcaggaaagagggaaggtacaggggtcctctcagccttgaaggagcccactgctcctcctggtttctgtttccccttcctcactctccccatgctgacttggctctgtaacagaagtgagcagtatggctgtctttaagacctcacaccttctcatctgcaggttggctagaagtggtggcatcctctcactctgtaattgtaatctcagctctcctaatcccatcacttccccagcccagagaagacattccaaccctgtctgatacccaggcccgtttctcacctgagcgcaccaccacctggcgtgtagaatctccaggaagcctggctgcagcttcccatttggttacgaggttggagaaaaagtcaaagtcccctcctgggctgtcttcatcatactccgcagtcagactgggctggtagtaagctgccggtggaacacaatcatttgccctgggtgtccttggtcctgcctggctctctgtagtggaggctccccttggcctcaccttctctggcccttaggatctccccatttggagacagagccatttggatattttccccttgaacttctccatgacctgaagcgttccttccctggaggaactctggttgcagggctaaacttagaggctgctagagtgtagtggttaagaacaggaacttgggtaccaggcgcctgaattttaatcagctccctcatttattaactctctgacttgatgcaagttacttaacctctctgtatagaattttcacatctttaaaatgggaataatagtacctacctcatagggttgttgtaaggaataaatgataataagcataaaacacttc

SEQ ID NO: 7224 - protein, 678 aa, Homo sapiens; identical to SEQ ID NO: 992

SEQ ID NO: 7225 - DNA, 6434 bp, Homo sapiens
tgcgatgtggacaagagaggtccccgctgggtgaggaacccgggaaggcccgcccagattcgggccccctgcccttgtcccctgggctgggggcgcgggcaaagcgggggcctggcgggcgctgagaggacctgaagccggcgcgggcggcggaggcgggctgggggcagcagccatgcctacctggggggcccgccccgcgtccccagatcgctttgcggtgtctgcggaggctgagaacaaggttcgggaacagcagccccatgtggagcgcatcttcagcgtgggggtgagcgtccttccgaaggactgtccggacaacccccacatctggctgcagctggagggccccaaggaaaacgccagcagagccaaggagtacctgaagggcctctgcagcccagaactgcaggatgaaatccactacccgcccaaactgcactgcatctttctgggagcccagggcttcttccttgactgcctggcctggagcacgtcagcccatctggtgcccagggcgccaggctcactgatgatcagtggcctgactgaagcctttgtcatggctcagagccgggtagaagagctggcagagcggctgagctgggacttcacgccaggaccatcttccggagcctctcagtgtactggagtgctgagagacttctctgccctgctgcagtccccgggggatgcccatagagaggctctgttgcagttgcccctggctgtccaggaggagctgctgagtctggtgcaggaggcgtctagtgggcaggggccaggagcactggcttcttgggaggggcggagctcagccttgctgggtgctcagtgccaaggagtgagagctccccctagtgacggcagggagtccctggacactggatctatgggacccggagattgcaggggagcaaggggagacacttacgctgtggagaaggagggagggaaacagggtggtcccagggagatggattgggggtggaaggagttgcctggggaagaggcgtgggagagagaagtggccctcaggccacagtcagtgggtggaggggcaagggagtcagcacccctgaaagggaaggccctggggaaggaggagatagctctgggaggaggagggttctgtgtccaccgtgagcctcccggtgcccatggctcctgtcacagggcagctcagtcccgaggagcctccctcctccagcggctccacaatgggaatgcctctcctccgagggtgcccagccctccacctgcaccggaacccccatggcactgtggagaccggggtgactgcggagaccggggagacgtgggggacaggggagacaagcagcagggcatggcacggggtcgggggcctcaatggaaacgaggcgcccgagggggcaacttggtgactggcacacagcgtttcaaggaggccctgcaggatcctttcaccctgtgccttgccaatgtgcctggccagccagacctccgccatattgtcattgacggcagcaacgtggccatggtgcatggcctccagcactacttctccagccggggcattgccattgctgtgcagtacttctgggaccgtggtcaccgtgacataactgtctttgtgcctcagtggcgcttcagtaaggatgccaaagtcagagagagtcacttcctgcaaaagctgtattccctcagcctgctctccctcacaccctcacgagtcatggatggcaagaggatctcctcctatgatgacaggttcatggtgaagctggctgaagagacagatgggataattgtctccaatgaccagttccgggacctggcggaggagtctgagaagtggatggcaatcatcagagaacgcctgctgccctttacctttgtgggaaacctcttcatggtacctgatgacccactggggcgaaacggccccaccctggatgaatttctgaagaagccagccaggacacaggggtcttctaaggctcagcatccttccaggggctttgcagaacatggtaaacagcagcaggggagagaagaggaaaaaggtagtggtggcattcggaagacccgggaaacagagcggctccggcggcagctgctggaggtgttttggggtcaggatcacaaagtggacttcatcctgcagcgggagccatactgccgggacatcaaccaactgtctgaggccctgctcagtcttaacttttgagcctcacctgcttgagtggctgccgccctgtcagctccagccgcctccagctcagccctttctgtgagagtccctctgctgctcactctgatccagaggcaccctgagttggtgctttggatcagggaagccactttgggacaggtccataaagtgaactgatcttaccgagtcaggacctcagccagctctcaagaggttctgctcagccttaacttctcaactttgccttagcacagggtttctgtagggagtgggggctgctagaggggattagttccggagactgagactgttggctccacctccaagctgagctagggtggagggcagggtgggcaggaagtgacaggaagttaagctgttcctctccctggctgctgctctggatggccagagaacaagatgctcccttgctgagctcctgggagcgtggaaggagatgctaggccctggcacagtgttatgtggactgggccacgatagggtggagtgagctagtgaagaaggcagagggagacttggcttctggtctcagctatgcctgttttgtgaccttgattgagttgcttgggctttacttctgcctacaaatcaggggtaaaaatacctgttgggaggagaaatgagaacatagaggaaagcctcttggaggaaaggtgcttggaccaagtctcaggtgtgtctgcctgtggctgcacaggctctctaaccgaaacctcactttcagagagatgtgggtcctttgtctccaggatccacaccctagattttaacactgcattctcactataacgtgccctataatggctgcatcccttttgagcaacctccaaaatctacatttacacagtaggtaaattagggatgactgcattatcaaaatactctcagggttcctataaatggcagctctcctgttgtattcaggtgttgtttacagactaacaaatgtgttggcaaatccctggttagatgcacttcctggtgttgagatgaacacgtcgatttttcaccaatcgatgaagccatgctctgcaatgacaatattaatgtgatccgaccctaacattttctctatggaagacgtatgttgcataaagcaaggcacacttctgctttatgtgtgtgtgtatggggatgggaggacttaacggaagttgaaccagttggttctagatgaaccaattatctggaaaatgaaagaaccagagttggaaggcacttgactggccaccagaccaactctgctgttactgacatgctttcttcaccctgattcctagaggtcattgccctggatctgcttgaagtcctcctgtgccagggaatttactatctccagggtagcacattccctgtgtagacggtattaatcagtactccttactttagtgcagcctaaagtatgcttttctgttacatccacctttgaggctggtcatacctccaggaacaatacagagccagtcaacttcctggaatccaagaccagataaagaagtaggacaggtgcccctgggttctgttctgtgtgggcctgtggggagtctctagacaagatcttttccaggccctgacttctgcctccctctgagtggcacagggagttgaatactgcatggcgagtgtaatgatgatggggagggtccttgtgtcctcaccccttcctttttggtgatttacaccactgtaccatactgacccaggctgggggcaggtgtgttggagacaggctggtcaaagaggtgacaatgattaagagataacccagcggtccctgagaagagattggttagtatggcctgaactggtggctgggggaactgtgtctggtcaagttatggcagatgtcacagctttaggtaggtaaaaagggtcctagatgaaaaccttggagtttttttttttcctgatagggttgtttatacttcttgattggtttcttgccattttcactttcagtgatggtgggtgtgcagtagaccaaaagtgtcttctgcccttttgtgctaagggccctggttgactgagtggccccagtcagatgagaggcaagtcctaagcttcttatagacagggatgttgactttgttctgctgcagcctgataaactgggaccactgtgtggttagtaatgcacttgccatttggtgacacagactgaaggctatcctacacctgggccttacctcttcctctactggcatcctaatggcactctgacagcatccagggtgactacagggcccattggaaatggatcatcattctctcttctagtgtctatctttatcataacctgatgtcccaaacttgtgacaagttcttttggcaactgaaggaccaagaagggaaacggtgatgagagagactgctcattgtaactttcaaaaccccgtctttggggaagaatcatctagggtgacattccttgaagtaaatcccaggagaatctaggccaaagagatgagccaaggttagtgagacaatttatttttattgcctaaactgcagagcattctctacacagcgtaaaggagaagtggggcagctgcaggacatgtagagaaaccaaactgggaaatcttacaaggagttgaaaagattaatgtcccaacctgatgagattacggccttgagacaataaggtggagcaacagaacaatgggaaagaggactgggagaggaatctaagaaccagatggcttcagctctctagaggagctgagcctattcacagtgcctaacctggaagcctgtgaggaacaggcctcaggcccttgccacgacctacttaggctacaatttcctttaaggcagcccctagctctgggaaggaatactggtagccagtggccagtgttcgctgtgggatcaccttctggccctccagcagcatgatggcacgctgtcgcccaaagacagcttgcaccacagcgctggggagagggatgaaggctcggcggcccagggcagcacccaaggtctgggcaaactcagcattagtggcggaggatggagccactccattcaggaccccgtgcacgtggtttgcttcaagggcatgggtcaggattcctgccaggtccccgatgtgtatccaggggaagaattggtggcctgagccgatggggccccccaggcccaggcgaaagggcagcagcatgtggcccatggcaccacccccacggcccagcacaacccctagagcaggaaagagggaaggtacaggggtcctctcagccttgaaggagcccactgctcctcctggtttctgtttccccttcctcactctccccatgctgacttggctctgtaacagaagtgagcagtatggctgtctttaagacctcacaccttctcatctgcaggttggctagaagtggtggcatcctctcactctgtaattgtaatctcagctctcctaatcccatcacttccccagcccagagaagacattccaaccctgtctgatacccaggcccgtttctcacctgagcgcaccaccacctggcgtgtagaatctccaggaagcctggctgcagcttcccatttggttacgaggttggagaaaaagtcaaagtcccctcctgggctgtcttcatcatactccgcagtcagactgggctggtagtaagctgccggtggaacacaatcatttgccctgggtgtccttggtcctgcctggctctctgtagtggaggctccccttggcctcaccttctctggcccttaggatctccccatttggagacagagccatttggatattttccccttgaacttctccatgacctgaagcgttccttccctggaggaactctggttgcagggctaaacttagaggctgctagagtgtagtggttaagaacaggaacttgggtaccaggcgcctgaattttaatcagctccctcatttattaactctctgacttgatgcaagttacttaacctctctgtatagaattttcacatctttaaaatgggaataatagtacctacctcatagggttgttgtaaggaataaatgataataagcataaaacacttcaaatagtggctggtgtgtataattgtttgcaattacttggtcccaaaggtgaccaggaactctgttcctaaagaactatggtgtgagaagtaagggactttgggataggtggacttttccctggcattgagtgatgccactccccactgttttttcagggtctcaatt

SEQ ID NO: 7226 - protein, 678 aa, Homo sapiens; identical to SEQ ID NO: 992

SEQ ID NO: 7227 - DNA, 3361 bp, Homo sapiens
gcttaagtcctcacgtataactcaggatgcccaggaaatgaatgccctttccctctacaggagacgttgactgtttctcttaagccgaaattcagggctttacaagaaattggtatgaaatagctcccaggaaaagacagagagagggatatgtgcacttatgtatttagtggctttttatttcccatgtttctcctgcagatggaatgaaaccttccaaaaagaggtaatcggcagccgcctagagaccacccaattgctggctaaagccatcaccaaagccccacaaccccccaaggcctgggtcttagtcacaggtgtaggtacgccccccaaatcaccagccccttatattcgccaggggaacggggtaactcagacctctgtagctatgcacacaccagagcactggtcttttccaggcaaaatgacttcctaggcccttgatccatgcatgtttctcctaacctttgtgtactttcactaagaaattgagaccctgaaaaaacagtggggagtggcatcactcaatgccagggaaaagtccacctatcccaaagtcccttacttctcacaccatagttctttaggaacagagttcctggtcacctttgggaccaagtaattgcaaacaattatacacaccagccactatttgaagtgttttatgcttattatcatttattccttacaacaaccctatgaggtaggtactattattcccattttaaagatgtgaaaattctatacagagaggttaagtaacttgcatcaagtcagagagttaataaatgagggagctgattaaaattcaggcgcctggtacccaagttcctgttcttaaccactacactctagcagcctctaagtttagccctgcaaccagagttcctccagggaaggaacgcttcaggtcatggagaagttcaaggggaaaatatccaaatggctctgtctccaaatggggagatcctaagggccagagaaggtgaggccaaggggagcctccactacagagagccaggcaggaccaaggacacccagggcaaatgattgtgttccaccggcagcttactaccagcccagtctgactgcggagtatgatgaagacagcccaggaggggactttgactttttctccaacctcgtaaccaaatgggaagctgcagccaggcttcctggagattctacacgccaggtggtggtgcgctcaggggttgtgctgggccgtgggggtggtgccatgggccacatgctgctgccctttcgcctgggcctggggggccccatcggctcaggccaccaattcttcccctggatacacatcggggacctggcaggaatcctgacccatgcccttgaagcaaaccacgtgcacggggtcctgaatggagtggctccatcctccgccactaatgctgagtttgcccagaccttgggtgctgccctgggccgccgagccttcatccctctccccagcgctgtggtgcaagctgtctttgggcgacagcgtgccatcatgctgctggagggccagaaggtgatcccacagcgaacactggccactggctaccagtattccttcccagagctaggggctgccttaaaggaaattgtagcctaagtaggtcgtggcaagggcctgaggcctgttcctcacaggcttccaggttaggcactgtgaataggctcagctcctctagagagctgaagccatctggttcttagattcctctcccagtcctctttcccattgttctgttgctccaccttattgtctcaaggccgtaatctcatcaggttgggacattaatcttttcaactccttgtaagatttcccagtttggtttctctacatgtcctgcagctgccccacttctcctttacgctgtgtagagaatgctctgcagtttaggcaataaaaataaattgtctcactaaccttggctcatctctttggcctagattctcctgggatttacttcaaggaatgtcaccctagatgattcttccccaaagacggggttttgaaagttacaatgagcagtctctctcatcaccgtttcccttcttggtccttcagttgccaaaagaacttgtcacaagtttgggacatcaggttatgataaagatagacactagaagagagaatgatgatccatttccaatgggccctgtagtcaccctggatgctgtcagagtgccattaggatgccagtagaggaagaggtaaggcccaggtgtaggatagccttcagtctgtgtcaccaaatggcaagtgcattactaaccacacagtggtcccagtttatcaggctgcagcagaacaaagtcaacatccctgtctataagaagcttaggacttgcctctcatctgactggggccactcagtcaaccagggcccttagcacaaaagggcagaagacacttttggtctactgcacacccaccatcactgaaagtgaaaatggcaagaaaccaatcaagaagtataaacaaccctatcaggaaaaaaaaaaactccaaggttttcatctaggaccctttttacctacctaaagctgtgacatctgccataacttgaccagacacagttcccccagccaccagttcaggccatactaaccaatctcttctcagggaccgctgggttatctcttaatcattgtcacctctttgaccagcctgtctccaacacacctgcccccagcctgggtcagtatggtacagtggtgtaaatcaccaaaaaggaaggggtgaggacacaaggaccctccccatcatcattacactcgccatgcagtattcaactccctgtgccactcagagggaggcagaagtcagggcctggaaaagatcttgtctagagactccccacaggcccacacagaacagaacccaggggcacctgtcctacttctttatctggtcttggattccaggaagttgactggctctgtattgttcctggaggtatgaccagcctcaaaggtggatgtaacagaaaagcatactttaggctgcactaaagtaaggagtactgattaataccgtctacacagggaatgtgctaccctggagatagtaaattccctggcacaggaggacttcaagcagatccagggcaatgacctctaggaatcagggtgaagaaagcatgtcagtaacagcagagttggtctggtggccagtcaagtgccttccaactctggttctttcattttccagataattggttcatctagaaccaactggttcaacttccgttaagtcctcccatccccatacacacacacataaagcagaagtgtgccttgctttatgcaacatacgtcttccatagagaaaatgttagggtcg

SEQ ID NO: 7228 - protein, 68 aa, Homo sapiens
MGSCSQASWRFYTPGGGALRGCAGPWGWCHGPHAAALSPGPGGPHRLRPPILPLDTHRGPGRNPDPCP

SEQ ID NO: 7229 - DNA, 2927 bp, Homo sapiens
agtcgctatgcgtgtgcttgtgggtgagggagggcagaaagggagagtgctgggcgggcttagtcggagattgaggactgggaatccgcttccgggagggcactgtctagtgcacaggcaacctggccttggcctcctagcccgagaagccgaatctccctaatccctgtgacctgtgtcacctctgcatcgcgaggagggggataagtggggagaagcctggtgtcagatgggatggcgccggaagagggtgccacagcggggacggaaggcgcccccaccccaactccacgggaatataaacaatttgtattttccgatcaggtggcgggacaggcttcattgggacagccctaacccagctgctgaatgccagaggccacgaagtgacgttggtctcccgaaagcccgggcccggccggatcacgtgggatgagctcgctgcatcggggctgccgagctgcgatgccgccgtcaacctggccggagagaacatcctcaaccctctccgaagatggaatgaaaccttccaaaaagaggtaatcggcagccgcctagagaccacccaattgctggctaaagccatcaccaaagccccacaaccccccaaggcctgggtcttagtcacaggtgtagcttactaccagcccagtctgactgcggagtatgatgaagacagcccaggaggggactttgactttttctccaacctcgtaaccaaatgggaagctgcagccaggcttcctggagattctacacgccaggtggtggtgcgctcaggggttgtgctgggccgtgggggtggtgccatgggccacatgctgctgccctttcgcctgggcctggggggccccatcggctcaggccaccaattcttcccctggatacacatcggggacctggcaggaatcctgacccatgcccttgaagcaaaccacgtgcacggggtcctgaatggagtggctccatcctccgccactaatgctgagtttgcccagaccttgggtgctgccctgggccgccgagccttcatccctctccccagcgctgtggtgcaagctgtctttgggcgacagcgtgccatcatgctgctggagggccagaaggtgatcccacagcgaacactggccactggctaccagtattccttcccagagctaggggctgccttaaaggaaattgtagcctaagtaggtcgtggcaagggcctgaggcctgttcctcacaggcttccaggttaggcactgtgaataggctcagctcctctagagagctgaagccatctggttcttagattcctctcccagtcctctttcccattgttctgttgctccaccttattgtctcaaggccgtaatctcatcaggttgggacattaatcttttcaactccttgtaagatttcccagtttggtttctctacatgtcctgcagctgccccacttctcctttacgctgtgtagagaatgctctgcagtttaggcaataaaaataaattgtctcactaaccttggctcatctctttggcctagattctcctgggatttacttcaaggaatgtcaccctagatgattcttccccaaagacggggttttgaaagttacaatgagcagtctctctcatcaccgtttcccttcttggtccttcagttgccaaaagaacttgtcacaagtttgggacatcaggttatgataaagatagacactagaagagagaatgatgatccatttccaatgggccctgtagtcaccctggatgctgtcagagtgccattaggatgccagtagaggaagaggtaaggcccaggtgtaggatagccttcagtctgtgtcaccaaatggcaagtgcattactaaccacacagtggtcccagtttatcaggctgcagcagaacaaagtcaacatccctgtctataagaagcttaggacttgcctctcatctgactggggccactcagtcaaccagggcccttagcacaaaagggcagaagacacttttggtctactgcacacccaccatcactgaaagtgaaaatggcaagaaaccaatcaagaagtataaacaaccctatcaggaaaaaaaaaaactccaaggttttcatctaggaccctttttacctacctaaagctgtgacatctgccataacttgaccagacacagttcccccagccaccagttcaggccatactaaccaatctcttctcagggaccgctgggttatctcttaatcattgtcacctctttgaccagcctgtctccaacacacctgcccccagcctgggtcagtatggtacagtggtgtaaatcaccaaaaaggaaggggtgaggacacaaggaccctccccatcatcattacactcgccatgcagtattcaactccctgtgccactcagagggaggcagaagtcagggcctggaaaagatcttgtctagagactccccacaggcccacacagaacagaacccaggggcacctgtcctacttctttatctggtcttggattccaggaagttgactggctctgtattgttcctggaggtatgaccagcctcaaaggtggatgtaacagaaaagcatactttaggctgcactaaagtaaggagtactgattaataccgtctacacagggaatgtgctaccctggagatagtaaattccctggcacaggaggacttcaagcagatccagggcaatgacctctaggaatcagggtgaagaaagcatgtcagtaacagcagagttggtctggtggccagtcaagtgccttccaactctggttctttcattttccagataattggttcatctagaaccaactggttcaacttccgttaagtcctcccatccccatacacacacacataaagcagaagtgtgccttgctttatgcaacatacgtcttccatagagaaaatgttagggtcg

SEQ ID NO: 7230 - protein, 68 aa, Homo sapiens; identical to SEQ ID NO: 7228

SEQ ID NO: 7231 - DNA, 2885 bp, Homo sapiens
agtcgctatgcgtgtgcttgtgggtgagggagggcagaaagggagagtgctgggcgggcttagtcggagattgaggactgggaatccgcttccgggagggcactgtctagtgcacaggcaacctggccttggcctcctagcccgagaagccgaatctccctaatccctgtgacctgtgtcacctctgcatcgcgaggagggggataagtggggagaagcctggtgtcagatgggatggcgccggaagagggtgccacagcggggacggaaggcgcccccaccccaactccacgggaatataaacaatttgtattttccgatcaggtggcgggacaggcttcattgggacagccctaacccagctgctgaatgccagaggccacgaagtgacgttggtctcccgaaagcccgggcccggccggatcacgtgggatgagctcgctgcatcggggctgccgagctgcgatgccgccgtcaacctggccggagagaacatcctcaaccctctccgaaggtcagcccgggccctaaagctgatacccactagagcacagggaggacagtgccccactgatgagaacctgtgagctatggcttactaccagcccagtctgactgcggagtatgatgaagacagcccaggaggggactttgactttttctccaacctcgtaaccaaatgggaagctgcagccaggcttcctggagattctacacgccaggtggtggtgcgctcaggggttgtgctgggccgtgggggtggtgccatgggccacatgctgctgccctttcgcctgggcctggggggccccatcggctcaggccaccaattcttcccctggatacacatcggggacctggcaggaatcctgacccatgcccttgaagcaaaccacgtgcacggggtcctgaatggagtggctccatcctccgccactaatgctgagtttgcccagaccttgggtgctgccctgggccgccgagccttcatccctctccccagcgctgtggtgcaagctgtctttgggcgacagcgtgccatcatgctgctggagggccagaaggtgatcccacagcgaacactggccactggctaccagtattccttcccagagctaggggctgccttaaaggaaattgtagcctaagtaggtcgtggcaagggcctgaggcctgttcctcacaggcttccaggttaggcactgtgaataggctcagctcctctagagagctgaagccatctggttcttagattcctctcccagtcctctttcccattgttctgttgctccaccttattgtctcaaggccgtaatctcatcaggttgggacattaatcttttcaactccttgtaagatttcccagtttggtttctctacatgtcctgcagctgccccacttctcctttacgctgtgtagagaatgctctgcagtttaggcaataaaaataaattgtctcactaaccttggctcatctctttggcctagattctcctgggatttacttcaaggaatgtcaccctagatgattcttccccaaagacggggttttgaaagttacaatgagcagtctctctcatcaccgtttcccttcttggtccttcagttgccaaaagaacttgtcacaagtttgggacatcaggttatgataaagatagacactagaagagagaatgatgatccatttccaatgggccctgtagtcaccctggatgctgtcagagtgccattaggatgccagtagaggaagaggtaaggcccaggtgtaggatagccttcagtctgtgtcaccaaatggcaagtgcattactaaccacacagtggtcccagtttatcaggctgcagcagaacaaagtcaacatccctgtctataagaagcttaggacttgcctctcatctgactggggccactcagtcaaccagggcccttagcacaaaagggcagaagacacttttggtctactgcacacccaccatcactgaaagtgaaaatggcaagaaaccaatcaagaagtataaacaaccctatcaggaaaaaaaaaaactccaaggttttcatctaggaccctttttacctacctaaagctgtgacatctgccataacttgaccagacacagttcccccagccaccagttcaggccatactaaccaatctcttctcagggaccgctgggttatctcttaatcattgtcacctctttgaccagcctgtctccaacacacctgcccccagcctgggtcagtatggtacagtggtgtaaatcaccaaaaaggaaggggtgaggacacaaggaccctccccatcatcattacactcgccatgcagtattcaactccctgtgccactcagagggaggcagaagtcagggcctggaaaagatcttgtctagagactccccacaggcccacacagaacagaacccaggggcacctgtcctacttctttatctggtcttggattccaggaagttgactggctctgtattgttcctggaggtatgaccagcctcaaaggtggatgtaacagaaaagcatactttaggctgcactaaagtaaggagtactgattaataccgtctacacagggaatgtgctaccctggagatagtaaattccctggcacaggaggacttcaagcagatccagggcaatgacctctaggaatcagggtgaagaaagcatgtcagtaacagcagagttggtctggtggccagtcaagtgccttccaactctggttctttcattttccagataattggttcatctagaaccaactggttcaacttccgttaagtcctcccatccccatacacacacacataaagcagaagtgtgccttgctttatgcaacatacgtcttccatagagaaaatgttagggtcg

SEQ ID NO: 7232 - protein, 185 aa, Homo sapiens
MAYYQPSLTAEYDEDSPGGDFDFFSNLVTKWEAAARLPGDSTRQVVVRSGVVLGRGGGAMGHMLLPFRLGLGGPIGSGHQFFPWIHIGDLAGILTHALEANHVHGVLNGVAPSSATNAEFAQTLGAALGRRAFIPLPSAVVQAVFGRQRAIMLLEGQKVIPQRTLATGYQYSFPELGAALKEIVA

SEQ ID NO: 7233 - DNA, 2642 bp, Homo sapiens
aggcgcgttaggtcctagtcgctatgcgtgtgcttgtgggtggcgggacaggcttcattgggacagccctaacccagctgctgaatgccagaggccacgaagtgacgttggtctcccgaaagcccgggcccggccggatcacgtgggatgagctcgctgcatcggggctgccgagctgcgatgccgccgtcaacctggccggagagaacatcctcaaccctctccgaagatggaatgaaaccttccaaaaagaggtaatcggcagccgcctagagaccacccaattgctggctaaagccatcaccaaagccccacaaccccccaaggcctgggtcttagtcacaggtgtagcttactaccagcccagtctgactgcggagtatgatgaagacagcccaggaggggactttgactttttctccaacctcgtaaccaaatgggaagctgcagccaggcttcctggagattctacacgccaggtggtggtgcgctcaggggttgtgctgggccgtgggggtggtgccatgggccacatgctgctgccctttcgcctgggcctggggggccccatcggctcaggccaccaattcttcccctggatacacatcggggacctggcaggaatcctgacccatgcccttgaagcaaaccacgtgcacggggtcctgaatggagtggctccatcctccgccactaatgctgagtttgcccagaccttgggtgctgccctgggccgccgagccttcatccctctccccagcgctgtggtgcaagctgtctttgggcgacagcgtgccatcatgctgctggagggccagaaggtgatcccacagcgaacactggccactggctaccagtattccttcccagagctaggggctgccttaaaggaaattgtagcctaagtaggtcgtggcaagggcctgaggcctgttcctcacaggcttccaggttaggcactgtgaataggctcagctcctctagagagctgaagccatctggttcttagattcctctcccagtcctctttcccattgttctgttgctccaccttattgtctcaaggccgtaatctcatcaggttgggacattaatcttttcaactccttgtaagatttcccagtttggtttctctacatgtcctgcagctgccccacttctcctttacgctgtgtagagaatgctctgcagtttaggcaataaaaataaattgtctcactaaccttggctcatctctttggcctagattctcctgggatttacttcaaggaatgtcaccctagatgattcttccccaaagacggggttttgaaagttacaatgagcagtctctctcatcaccgtttcccttcttggtccttcagttgccaaaagaacttgtcacaagtttgggacatcaggttatgataaagatagacactagaagagagaatgatgatccatttccaatgggccctgtagtcaccctggatgctgtcagagtgccattaggatgccagtagaggaagaggtaaggcccaggtgtaggatagccttcagtctgtgtcaccaaatggcaagtgcattactaaccacacagtggtcccagtttatcaggctgcagcagaacaaagtcaacatccctgtctataagaagcttaggacttgcctctcatctgactggggccactcagtcaaccagggcccttagcacaaaagggcagaagacacttttggtctactgcacacccaccatcactgaaagtgaaaatggcaagaaaccaatcaagaagtataaacaaccctatcaggaaaaaaaaaaactccaaggttttcatctaggaccctttttacctacctaaagctgtgacatctgccataacttgaccagacacagttcccccagccaccagttcaggccatactaaccaatctcttctcagggaccgctgggttatctcttaatcattgtcacctctttgaccagcctgtctccaacacacctgcccccagcctgggtcagtatggtacagtggtgtaaatcaccaaaaaggaaggggtgaggacacaaggaccctccccatcatcattacactcgccatgcagtattcaactccctgtgccactcagagggaggcagaagtcagggcctggaaaagatcttgtctagagactccccacaggcccacacagaacagaacccaggggcacctgtcctacttctttatctggtcttggattccaggaagttgactggctctgtattgttcctggaggtatgaccagcctcaaaggtggatgtaacagaaaagcatactttaggctgcactaaagtaaggagtactgattaataccgtctacacagggaatgtgctaccctggagatagtaaattccctggcacaggaggacttcaagcagatccagggcaatgacctctaggaatcagggtgaagaaagcatgtcagtaacagcagagttggtctggtggccagtcaagtgccttccaactctggttctttcattttccagataattggttcatctagaaccaactggttcaacttccgttaagtcctcccatccccatacacacacacataaagcagaagtgtgccttgctttatgcaacatacgtcttccatagagaaaatgttagggtcg

SEQ ID NO: 7234 - protein, 293 aa, Homo sapiens
MRVLVGGGTGFIGTALTQLLNARGHEVTLVSRKPGPGRITWDELAASGLPSCDAAVNLAGENILNPLRRWNETFQKEVIGSRLETTQLLAKAITKAPQPPKAWVLVTGVAYYQPSLTAEYDEDSPGGDFDFFSNLVTKWEAAARLPGDSTRQVVVRSGVVLGRGGGAMGHMLLPFRLGLGGPIGSGHQFFPWIHIGDLAGILTHALEANHVHGVLNGVAPSSATNAEFAQTLGAALGRRAFIPLPSAVVQAVFGRQRAIMLLEGQKVIPQRTLATGYQYSFPELGAALKEIVA

SEQ ID NO: 7235 - DNA, 2980 bp, Homo sapiens
gggagggcagaaagggagagtgctgggcgggcttagtcggagattgaggactgggaatccgcttccgggagggcactgtctagtgcacaggcaacctggccttggcctcctagcccgagaagccgaatctccctaatccctgtgacctgtgtcacctctgcatcgcgaggagggggataagtggggagaagcctggtgtcagatgggatggcgccggaagagggtgccacagcggggacggaaggcgcccccaccccaactccacgggaatataaacaatttgtattttccgatcaggtggcgggacaggcttcattgggacagccctaacccagctgctgaatgccagaggccacgaagtgacgttggtctcccgaaagcccgggcccggccggatcacgtgggatgagctcgctgcatcggggctgccgagctgcgatgccgccgtcaacctggccggagagaacatcctcaaccctctccgaaggtcagcccgggccctaaagctgatacccactagagcacagggaggacagtgccccactgatgagaacctgtgagctatggatggaatgaaaccttccaaaaagaggtaatcggcagccgcctagagaccacccaattgctggctaaagccatcaccaaagccccacaaccccccaaggcctgggtcttagtcacaggtgtagcttactaccagcccagtctgactgcggagtatgatgaagacagcccaggaggggactttgactttttctccaacctcgtaaccaaatgggaagctgcagccaggcttcctggagattctacacgccaggtggtggtgcgctcaggggttgtgctgggccgtgggggtggtgccatgggccacatgctgctgccctttcgcctgggcctggggggccccatcggctcaggccaccaattcttcccctggatacacatcggggacctggcaggaatcctgacccatgcccttgaagcaaaccacgtgcacggggtcctgaatggagtggctccatcctccgccactaatgctgagtttgcccagaccttgggtgctgccctgggccgccgagccttcatccctctccccagcgctgtggtgcaagctgtctttgggcgacagcgtgccatcatgctgctggagggccagaaggtgatcccacagcgaacactggccactggctaccagtattccttcccagagctaggggctgccttaaaggaaattgtagcctaagtaggtcgtggcaagggcctgaggcctgttcctcacaggcttccaggttaggcactgtgaataggctcagctcctctagagagctgaagccatctggttcttagattcctctcccagtcctctttcccattgttctgttgctccaccttattgtctcaaggccgtaatctcatcaggttgggacattaatcttttcaactccttgtaagatttcccagtttggtttctctacatgtcctgcagctgccccacttctcctttacgctgtgtagagaatgctctgcagtttaggcaataaaaataaattgtctcactaaccttggctcatctctttggcctagattctcctgggatttacttcaaggaatgtcaccctagatgattcttccccaaagacggggttttgaaagttacaatgagcagtctctctcatcaccgtttcccttcttggtccttcagttgccaaaagaacttgtcacaagtttgggacatcaggttatgataaagatagacactagaagagagaatgatgatccatttccaatgggccctgtagtcaccctggatgctgtcagagtgccattaggatgccagtagaggaagaggtaaggcccaggtgtaggatagccttcagtctgtgtcaccaaatggcaagtgcattactaaccacacagtggtcccagtttatcaggctgcagcagaacaaagtcaacatccctgtctataagaagcttaggacttgcctctcatctgactggggccactcagtcaaccagggcccttagcacaaaagggcagaagacacttttggtctactgcacacccaccatcactgaaagtgaaaatggcaagaaaccaatcaagaagtataaacaaccctatcaggaaaaaaaaaaactccaaggttttcatctaggaccctttttacctacctaaagctgtgacatctgccataacttgaccagacacagttcccccagccaccagttcaggccatactaaccaatctcttctcagggaccgctgggttatctcttaatcattgtcacctctttgaccagcctgtctccaacacacctgcccccagcctgggtcagtatggtacagtggtgtaaatcaccaaaaaggaaggggtgaggacacaaggaccctccccatcatcattacactcgccatgcagtattcaactccctgtgccactcagagggaggcagaagtcagggcctggaaaagatcttgtctagagactccccacaggcccacacagaacagaacccaggggcacctgtcctacttctttatctggtcttggattccaggaagttgactggctctgtattgttcctggaggtatgaccagcctcaaaggtggatgtaacagaaaagcatactttaggctgcactaaagtaaggagtactgattaataccgtctacacagggaatgtgctaccctggagatagtaaattccctggcacaggaggacttcaagcagatccagggcaatgacctctaggaatcagggtgaagaaagcatgtcagtaacagcagagttggtctggtggccagtcaagtgccttccaactctggttctttcattttccagataattggttcatctagaaccaactggttcaacttccgttaagtcctcccatccccatacacacacacataaagcagaagtgtgccttgctttatgcaacatacgtcttccatagagaaaatgttagggtcg

SEQ ID NO: 7236 - protein, 68 aa, Homo sapiens; identical to SEQ ID NO: 7228

SEQ ID NO: 7237 - DNA, 2943 bp, Homo sapiens
gggagggcagaaagggagagtgctgggcgggcttagtcggagattgaggactgggaatccgcttccgggagggcactgtctagtgcacaggcaacctggccttggcctcctagcccgagaagccgaatctccctaatccctgtgacctgtgtcacctctgcatcgcgaggagggggataagtggggagaagcctggtgtcagatgggatggcgccggaagagggtgccacagcggggacggaaggcgcccccaccccaactccacgggaatataaacaatttgtattttccgatcaggtggcgggacaggcttcattgggacagccctaacccagctgctgaatgccagaggccacgaagtgacgttggtctcccgaaagcccgggcccggccggatcacgtgggtaagtccatcctctggaagcgggtgggagggcagagttgggcggcgcagggcggggcaggggcactgtgtgctttctccgacaggatgagctcgctgcatcggggctgccgagctgcgatgccgccgtcaacctggccggagagaacatcctcaaccctctccgaaggtcagcccgggccctaaagctgatacccactagagcacagggaggacagtgccccactgatgagaacctgtgagctatggcttactaccagcccagtctgactgcggagtatgatgaagacagcccaggaggggactttgactttttctccaacctcgtaaccaaatgggaagctgcagccaggcttcctggagattctacacgccaggtggtggtgcgctcaggggttgtgctgggccgtgggggtggtgccatgggccacatgctgctgccctttcgcctgggcctggggggccccatcggctcaggccaccaattcttcccctggatacacatcggggacctggcaggaatcctgacccatgcccttgaagcaaaccacgtgcacggggtcctgaatggagtggctccatcctccgccactaatgctgagtttgcccagaccttgggtgctgccctgggccgccgagccttcatccctctccccagcgctgtggtgcaagctgtctttgggcgacagcgtgccatcatgctgctggagggccagaaggtgatcccacagcgaacactggccactggctaccagtattccttcccagagctaggggctgccttaaaggaaattgtagcctaagtaggtcgtggcaagggcctgaggcctgttcctcacaggcttccaggttaggcactgtgaataggctcagctcctctagagagctgaagccatctggttcttagattcctctcccagtcctctttcccattgttctgttgctccaccttattgtctcaaggccgtaatctcatcaggttgggacattaatcttttcaactccttgtaagatttcccagtttggtttctctacatgtcctgcagctgccccacttctcctttacgctgtgtagagaatgctctgcagtttaggcaataaaaataaattgtctcactaaccttggctcatctctttggcctagattctcctgggatttacttcaaggaatgtcaccctagatgattcttccccaaagacggggttttgaaagttacaatgagcagtctctctcatcaccgtttcccttcttggtccttcagttgccaaaagaacttgtcacaagtttgggacatcaggttatgataaagatagacactagaagagagaatgatgatccatttccaatgggccctgtagtcaccctggatgctgtcagagtgccattaggatgccagtagaggaagaggtaaggcccaggtgtaggatagccttcagtctgtgtcaccaaatggcaagtgcattactaaccacacagtggtcccagtttatcaggctgcagcagaacaaagtcaacatccctgtctataagaagcttaggacttgcctctcatctgactggggccactcagtcaaccagggcccttagcacaaaagggcagaagacacttttggtctactgcacacccaccatcactgaaagtgaaaatggcaagaaaccaatcaagaagtataaacaaccctatcaggaaaaaaaaaaactccaaggttttcatctaggaccctttttacctacctaaagctgtgacatctgccataacttgaccagacacagttcccccagccaccagttcaggccatactaaccaatctcttctcagggaccgctgggttatctcttaatcattgtcacctctttgaccagcctgtctccaacacacctgcccccagcctgggtcagtatggtacagtggtgtaaatcaccaaaaaggaaggggtgaggacacaaggaccctccccatcatcattacactcgccatgcagtattcaactccctgtgccactcagagggaggcagaagtcagggcctggaaaagatcttgtctagagactccccacaggcccacacagaacagaacccaggggcacctgtcctacttctttatctggtcttggattccaggaagttgactggctctgtattgttcctggaggtatgaccagcctcaaaggtggatgtaacagaaaagcatactttaggctgcactaaagtaaggagtactgattaataccgtctacacagggaatgtgctaccctggagatagtaaattccctggcacaggaggacttcaagcagatccagggcaatgacctctaggaatcagggtgaagaaagcatgtcagtaacagcagagttggtctggtggccagtcaagtgccttccaactctggttctttcattttccagataattggttcatctagaaccaactggttcaacttccgttaagtcctcccatccccatacacacacacataaagcagaagtgtgccttgctttatgcaacatacgtcttccatagagaaaatgttagggtcg

SEQ ID NO: 7238 - protein, 185 aa, Homo sapiens; identical to SEQ ID NO: 7232

SEQ ID NO: 7239 - DNA, 2695 bp, Homo sapiens
gggagggcagaaagggagagtgctgggcgggcttagtcggagattgaggactgggaatccgcttccgggagggcactgtctagtgcacaggcaacctggccttggcctcctagcccgagaagccgaatctccctaatccctgtgacctgtgtcacctctgcatcgcgaggagggggataagtggggagaagcctggtgtcagatgggatggcgccggaagagggtgccacagcggggacggaaggcgcccccaccccaactccacgggaatataaacaatttgtattttccgatcaggtggcgggacaggcttcattgggacagccctaacccagctgctgaatgccagaggccacgaagtgacgttggtctcccgaaagcccgggcccggccggatcacgtggcttactaccagcccagtctgactgcggagtatgatgaagacagcccaggaggggactttgactttttctccaacctcgtaaccaaatgggaagctgcagccaggcttcctggagattctacacgccaggtggtggtgcgctcaggggttgtgctgggccgtgggggtggtgccatgggccacatgctgctgccctttcgcctgggcctggggggccccatcggctcaggccaccaattcttcccctggatacacatcggggacctggcaggaatcctgacccatgcccttgaagcaaaccacgtgcacggggtcctgaatggagtggctccatcctccgccactaatgctgagtttgcccagaccttgggtgctgccctgggccgccgagccttcatccctctccccagcgctgtggtgcaagctgtctttgggcgacagcgtgccatcatgctgctggagggccagaaggtgatcccacagcgaacactggccactggctaccagtattccttcccagagctaggggctgccttaaaggaaattgtagcctaagtaggtcgtggcaagggcctgaggcctgttcctcacaggcttccaggttaggcactgtgaataggctcagctcctctagagagctgaagccatctggttcttagattcctctcccagtcctctttcccattgttctgttgctccaccttattgtctcaaggccgtaatctcatcaggttgggacattaatcttttcaactccttgtaagatttcccagtttggtttctctacatgtcctgcagctgccccacttctcctttacgctgtgtagagaatgctctgcagtttaggcaataaaaataaattgtctcactaaccttggctcatctctttggcctagattctcctgggatttacttcaaggaatgtcaccctagatgattcttccccaaagacggggttttgaaagttacaatgagcagtctctctcatcaccgtttcccttcttggtccttcagttgccaaaagaacttgtcacaagtttgggacatcaggttatgataaagatagacactagaagagagaatgatgatccatttccaatgggccctgtagtcaccctggatgctgtcagagtgccattaggatgccagtagaggaagaggtaaggcccaggtgtaggatagccttcagtctgtgtcaccaaatggcaagtgcattactaaccacacagtggtcccagtttatcaggctgcagcagaacaaagtcaacatccctgtctataagaagcttaggacttgcctctcatctgactggggccactcagtcaaccagggcccttagcacaaaagggcagaagacacttttggtctactgcacacccaccatcactgaaagtgaaaatggcaagaaaccaatcaagaagtataaacaaccctatcaggaaaaaaaaaaactccaaggttttcatctaggaccctttttacctacctaaagctgtgacatctgccataacttgaccagacacagttcccccagccaccagttcaggccatactaaccaatctcttctcagggaccgctgggttatctcttaatcattgtcacctctttgaccagcctgtctccaacacacctgcccccagcctgggtcagtatggtacagtggtgtaaatcaccaaaaaggaaggggtgaggacacaaggaccctccccatcatcattacactcgccatgcagtattcaactccctgtgccactcagagggaggcagaagtcagggcctggaaaagatcttgtctagagactccccacaggcccacacagaacagaacccaggggcacctgtcctacttctttatctggtcttggattccaggaagttgactggctctgtattgttcctggaggtatgaccagcctcaaaggtggatgtaacagaaaagcatactttaggctgcactaaagtaaggagtactgattaataccgtctacacagggaatgtgctaccctggagatagtaaattccctggcacaggaggacttcaagcagatccagggcaatgacctctaggaatcagggtgaagaaagcatgtcagtaacagcagagttggtctggtggccagtcaagtgccttccaactctggttctttcattttccagataattggttcatctagaaccaactggttcaacttccgttaagtcctcccatccccatacacacacacataaagcagaagtgtgccttgctttatgcaacatacgtcttccatagagaaaatgttagggtcg

SEQ ID NO: 7240 - protein, 251 aa, Homo sapiens
MGWRRKRVPQRGRKAPPPQLHGNINNLYFPIRWRDRLHWDSPNPAAECQRPRSDVGLPKARARPDHVAYYQPSLTAEYDEDSPGGDFDFFSNLVTKWEAAARLPGDSTRQVVVRSGVVLGRGGGAMGHMLLPFRLGLGGPIGSGHQFFPWIHIGDLAGILTHALEANHVHGVLNGVAPSSATNAEFAQTLGAALGRRAFIPLPSAVVQAVFGRQRAIMLLEGQKVIPQRTLATGYQYSFPELGAALKEIVA

SEQ ID NO: 7241 - DNA, 3371 bp, Homo sapiens
gtgagggagggcagaaagggagagtgctgggcgggcttagtcggagattgaggactgggaatccgcttccgggagggcactgtctagtgcacaggcaacctggccttggcctcctagcccgagaagccgaatctccctaatccctgtgacctgtgtcacctctgcatcgcgaggagggggataagtggggagaagcctggtgtcagatgggatggcgccggaagagggtgccacagcggggacggaaggcgcccccaccccaactccacgggaatataaacaatttgtattttccgatcaggtggcgggacaggcttcattgggacagccctaacccagctgctgaatgccagaggccacgaagtgacgttggtctcccgaaagcccgggcccggccggatcacgtgggtaagtccatcctctggaagcgggtgggagggcagagttgggcggcgcagggcggggcaggggcactgtgtgctttctccgacaggatgagctcgctgcatcggggctgccgagctgcgatgccgccgtcaacctggccggagagaacatcctcaaccctctccgaaggtcagcccgggccctaaagctgatacccactagagcacagggaggacagtgccccactgatgagaacctgtgagctatgggtaatggagctcccagattccgaactaaaccgatatcccagactactcattctgctccactcctccacccccacctgctcctccacccagtcagccaattggcttaagtcctcacgtataactcaggatgcccaggaaatgaatgccctttccctctacaggagacgttgactgtttctcttaagccgaaattcagggctttacaagaaattggtatgaaatagctcccaggaaaagacagagagagggatatgtgcacttatgtatttagtggctttttatttcccatgtttctcctgcagatggaatgaaaccttccaaaaagaggtaatcggcagccgcctagagaccacccaattgctggctaaagccatcaccaaagccccacaaccccccaaggcctgggtcttagtcacaggtgtagcttactaccagcccagtctgactgcggagtatgatgaagacagcccaggaggggactttgactttttctccaacctcgtaaccaaatgggaagctgcagccaggcttcctggagattctacacgccaggtggtggtgcgctcaggggttgtgctgggccgtgggggtggtgccatgggccacatgctgctgccctttcgcctgggcctggggggccccatcggctcaggccaccaattcttcccctggatacacatcggggacctggcaggaatcctgacccatgcccttgaagcaaaccacgtgcacggggtcctgaatggagtggctccatcctccgccactaatgctgagtttgcccagaccttgggtgctgccctgggccgccgagccttcatccctctccccagcgctgtggtgcaagctgtctttgggcgacagcgtgccatcatgctgctggagggccagaaggtgatcccacagcgaacactggccactggctaccagtattccttcccagagctaggggctgccttaaaggaaattgtagcctaagtaggtcgtggcaagggcctgaggcctgttcctcacaggcttccaggttaggcactgtgaataggctcagctcctctagagagctgaagccatctggttcttagattcctctcccagtcctctttcccattgttctgttgctccaccttattgtctcaaggccgtaatctcatcaggttgggacattaatcttttcaactccttgtaagatttcccagtttggtttctctacatgtcctgcagctgccccacttctcctttacgctgtgtagagaatgctctgcagtttaggcaataaaaataaattgtctcactaaccttggctcatctctttggcctagattctcctgggatttacttcaaggaatgtcaccctagatgattcttccccaaagacggggttttgaaagttacaatgagcagtctctctcatcaccgtttcccttcttggtccttcagttgccaaaagaacttgtcacaagtttgggacatcaggttatgataaagatagacactagaagagagaatgatgatccatttccaatgggccctgtagtcaccctggatgctgtcagagtgccattaggatgccagtagaggaagaggtaaggcccaggtgtaggatagccttcagtctgtgtcaccaaatggcaagtgcattactaaccacacagtggtcccagtttatcaggctgcagcagaacaaagtcaacatccctgtctataagaagcttaggacttgcctctcatctgactggggccactcagtcaaccagggcccttagcacaaaagggcagaagacacttttggtctactgcacacccaccatcactgaaagtgaaaatggcaagaaaccaatcaagaagtataaacaaccctatcaggaaaaaaaaaaactccaaggttttcatctaggaccctttttacctacctaaagctgtgacatctgccataacttgaccagacacagttcccccagccaccagttcaggccatactaaccaatctcttctcagggaccgctgggttatctcttaatcattgtcacctctttgaccagcctgtctccaacacacctgcccccagcctgggtcagtatggtacagtggtgtaaatcaccaaaaaggaaggggtgaggacacaaggaccctccccatcatcattacactcgccatgcagtattcaactccctgtgccactcagagggaggcagaagtcagggcctggaaaagatcttgtctagagactccccacaggcccacacagaacagaacccaggggcacctgtcctacttctttatctggtcttggattccaggaagttgactggctctgtattgttcctggaggtatgaccagcctcaaaggtggatgtaacagaaaagcatactttaggctgcactaaagtaaggagtactgattaataccgtctacacagggaatgtgctaccctggagatagtaaattccctggcacaggaggacttcaagcagatccagggcaatgacctctaggaatcagggtgaagaaagcatgtcagtaacagcagagttggtctggtggccagtcaagtgccttccaactctggttctttcattttccagataattggttcatctagaaccaactggttcaacttccgttaagtcctcccatccccatacacacacacataaagcagaagtgtgccttgctttatgcaacatacgtcttccatagagaaaatgttagggtcg

SEQ ID NO: 7242 - protein, 238 aa, Homo sapiens
MYLVAFYFPCFSCRWNETFQKEVIGSRLETTQLLAKAITKAPQPPKAWVLVTGVAYYQPSLTAEYDEDSPGGDFDFFSNLVTKWEAAARLPGDSTRQVVVRSGVVLGRGGGAMGHMLLPFRLGLGGPIGSGHQFFPWIHIGDLAGILTHALEANHVHGVLNGVAPSSATNAEFAQTLGAALGRRAFIPLPSAVVQAVFGRQRAIMLLEGQKVIPQRTLATGYQYSFPELGAALKEIVA

SEQ ID NO: 7243 - DNA, 2532 bp, Homo sapiens
gtgtgcttgtgggtggcgggacaggcttcattgggacagccctaacccagctgctgaatgccagaggccacgaagtgacgttggtctcccgaaagcccgggcccggccggatcacgtggatggaatgaaaccttccaaaaagaggtaatcggcagccgcctagagaccacccaattgctggctaaagccatcaccaaagccccacaaccccccaaggcctgggtcttagtcacaggtgtagcttactaccagcccagtctgactgcggagtatgatgaagacagcccaggaggggactttgactttttctccaacctcgtaaccaaatgggaagctgcagccaggcttcctggagattctacacgccaggtggtggtgcgctcaggggttgtgctgggccgtgggggtggtgccatgggccacatgctgctgccctttcgcctgggcctggggggccccatcggctcaggccaccaattcttcccctggatacacatcggggacctggcaggaatcctgacccatgcccttgaagcaaaccacgtgcacggggtcctgaatggagtggctccatcctccgccactaatgctgagtttgcccagaccttgggtgctgccctgggccgccgagccttcatccctctccccagcgctgtggtgcaagctgtctttgggcgacagcgtgccatcatgctgctggagggccagaaggtgatcccacagcgaacactggccactggctaccagtattccttcccagagctaggggctgccttaaaggaaattgtagcctaagtaggtcgtggcaagggcctgaggcctgttcctcacaggcttccaggttaggcactgtgaataggctcagctcctctagagagctgaagccatctggttcttagattcctctcccagtcctctttcccattgttctgttgctccaccttattgtctcaaggccgtaatctcatcaggttgggacattaatcttttcaactccttgtaagatttcccagtttggtttctctacatgtcctgcagctgccccacttctcctttacgctgtgtagagaatgctctgcagtttaggcaataaaaataaattgtctcactaaccttggctcatctctttggcctagattctcctgggatttacttcaaggaatgtcaccctagatgattcttccccaaagacggggttttgaaagttacaatgagcagtctctctcatcaccgtttcccttcttggtccttcagttgccaaaagaacttgtcacaagtttgggacatcaggttatgataaagatagacactagaagagagaatgatgatccatttccaatgggccctgtagtcaccctggatgctgtcagagtgccattaggatgccagtagaggaagaggtaaggcccaggtgtaggatagccttcagtctgtgtcaccaaatggcaagtgcattactaaccacacagtggtcccagtttatcaggctgcagcagaacaaagtcaacatccctgtctataagaagcttaggacttgcctctcatctgactggggccactcagtcaaccagggcccttagcacaaaagggcagaagacacttttggtctactgcacacccaccatcactgaaagtgaaaatggcaagaaaccaatcaagaagtataaacaaccctatcaggaaaaaaaaaaactccaaggttttcatctaggaccctttttacctacctaaagctgtgacatctgccataacttgaccagacacagttcccccagccaccagttcaggccatactaaccaatctcttctcagggaccgctgggttatctcttaatcattgtcacctctttgaccagcctgtctccaacacacctgcccccagcctgggtcagtatggtacagtggtgtaaatcaccaaaaaggaaggggtgaggacacaaggaccctccccatcatcattacactcgccatgcagtattcaactccctgtgccactcagagggaggcagaagtcagggcctggaaaagatcttgtctagagactccccacaggcccacacagaacagaacccaggggcacctgtcctacttctttatctggtcttggattccaggaagttgactggctctgtattgttcctggaggtatgaccagcctcaaaggtggatgtaacagaaaagcatactttaggctgcactaaagtaaggagtactgattaataccgtctacacagggaatgtgctaccctggagatagtaaattccctggcacaggaggacttcaagcagatccagggcaatgacctctaggaatcagggtgaagaaagcatgtcagtaacagcagagttggtctggtggccagtcaagtgccttccaactctggttctttcattttccagataattggttcatctagaaccaactggttcaacttccgttaagtcctcccatccccatacacacacacataaagcagaagtgtgccttgctttatgcaacatacgtcttccatagagaaaatgttagggtcg

SEQ ID NO: 7244 - protein, 68 aa, Homo sapiens; identical to SEQ ID NO: 7228

SEQ ID NO: 7245 - DNA, 3758 bp, Homo sapiens
agtcgctatgcgtgtgcttgtgggtggcgggacaggcttcattgggacagccctaacccagctgctgaatgccagaggccacgaagtgacgttggtctcccgaaagcccgggcccggccggatcacgtgggtaagtccatcctctggaagcgggtgggagggcagagttgggcggcgcagggcggggcaggggcactgtgtgctttctccgacaggatgagctcgctgcatcggggctgccgagctgcgatgccgccgtcaacctggccggagagaacatcctcaaccctctccgaaggtcagcccgggccctaaagctgatacccactagagcacagggaggacagtgccccactgatgagaacctgtgagctatgggtaatggagctcccagattccgaactaaaccgatatcccagactactcattctgctccactcctccacccccacctgctcctccacccagtcagccaattggcttaagtcctcacgtataactcaggatgcccaggaaatgaatgccctttccctctacaggagacgttgactgtttctcttaagccgaaattcagggctttacaagaaattggtatgaaatagctcccaggaaaagacagagagagggatatgtgcacttatgtatttagtggctttttatttcccatgtttctcctgcagatggaatgaaaccttccaaaaagaggtaatcggcagccgcctagagaccacccaattgctggctaaagccatcaccaaagccccacaaccccccaaggcctgggtcttagtcacaggtgtaggtacgccccccaaatcaccagccccttatattcgccaggggaacggggtaactcagacctctgtagctatgcacacaccagagcactggtcttttccaggcaaaatgacttcctaggcccttgatccatgcatgtttctcctaacctttgtgtactttcactaagaaattgagaccctgaaaaaacagtggggagtggcatcactcaatgccagggaaaagtccacctatcccaaagtcccttacttctcacaccatagttctttaggaacagagttcctggtcacctttgggaccaagtaattgcaaacaattatacacaccagccactatttgaagtgttttatgcttattatcatttattccttacaacaaccctatgaggtaggtactattattcccattttaaagatgtgaaaattctatacagagaggttaagtaacttgcatcaagtcagagagttaataaatgagggagctgattaaaattcaggcgcctggtacccaagttcctgttcttaaccactacactctagcagcctctaagtttagccctgcaaccagagttcctccagggaaggaacgcttcaggtcatggagaagttcaaggggaaaatatccaaatggctctgtctccaaatggggagatcctaagggccagagaagcttactaccagcccagtctgactgcggagtatgatgaagacagcccaggaggggactttgactttttctccaacctcgtaaccaaatgggaagctgcagccaggcttcctggagattctacacgccaggtggtggtgcgctcaggggttgtgctgggccgtgggggtggtgccatgggccacatgctgctgccctttcgcctgggcctggggggccccatcggctcaggccaccaattcttcccctggatacacatcggggacctggcaggaatcctgacccatgcccttgaagcaaaccacgtgcacggggtcctgaatggagtggctccatcctccgccactaatgctgagtttgcccagaccttgggtgctgccctgggccgccgagccttcatccctctccccagcgctgtggtgcaagctgtctttgggcgacagcgtgccatcatgctgctggagggccagaaggtgatcccacagcgaacactggccactggctaccagtattccttcccagagctaggggctgccttaaaggaaattgtagcctaagtaggtcgtggcaagggcctgaggcctgttcctcacaggcttccaggttaggcactgtgaataggctcagctcctctagagagctgaagccatctggttcttagattcctctcccagtcctctttcccattgttctgttgctccaccttattgtctcaaggccgtaatctcatcaggttgggacattaatcttttcaactccttgtaagatttcccagtttggtttctctacatgtcctgcagctgccccacttctcctttacgctgtgtagagaatgctctgcagtttaggcaataaaaataaattgtctcactaaccttggctcatctctttggcctagattctcctgggatttacttcaaggaatgtcaccctagatgattcttccccaaagacggggttttgaaagttacaatgagcagtctctctcatcaccgtttcccttcttggtccttcagttgccaaaagaacttgtcacaagtttgggacatcaggttatgataaagatagacactagaagagagaatgatgatccatttccaatgggccctgtagtcaccctggatgctgtcagagtgccattaggatgccagtagaggaagaggtaaggcccaggtgtaggatagccttcagtctgtgtcaccaaatggcaagtgcattactaaccacacagtggtcccagtttatcaggctgcagcagaacaaagtcaacatccctgtctataagaagcttaggacttgcctctcatctgactggggccactcagtcaaccagggcccttagcacaaaagggcagaagacacttttggtctactgcacacccaccatcactgaaagtgaaaatggcaagaaaccaatcaagaagtataaacaaccctatcaggaaaaaaaaaaactccaaggttttcatctaggaccctttttacctacctaaagctgtgacatctgccataacttgaccagacacagttcccccagccaccagttcaggccatactaaccaatctcttctcagggaccgctgggttatctcttaatcattgtcacctctttgaccagcctgtctccaacacacctgcccccagcctgggtcagtatggtacagtggtgtaaatcaccaaaaaggaaggggtgaggacacaaggaccctccccatcatcattacactcgccatgcagtattcaactccctgtgccactcagagggaggcagaagtcagggcctggaaaagatcttgtctagagactccccacaggcccacacagaacagaacccaggggcacctgtcctacttctttatctggtcttggattccaggaagttgactggctctgtattgttcctggaggtatgaccagcctcaaaggtggatgtaacagaaaagcatactttaggctgcactaaagtaaggagtactgattaataccgtctacacagggaatgtgctaccctggagatagtaaattccctggcacaggaggacttcaagcagatccagggcaatgacctctaggaatcagggtgaagaaagcatgtcagtaacagcagagttggtctggtggccagtcaagtgccttccaactctggttctttcattttccagataattggttcatctagaaccaactggttcaacttccgttaagtcctcccatccccatacacacacacataaagcagaagtgtgccttgctttatgcaacatacgtcttccatagagaaaatgttagggtcg

SEQ ID NO: 7246 - protein, 198 aa, Homo sapiens
MALSPNGEILRAREAYYQPSLTAEYDEDSPGGDFDFFSNLVTKWEAAARLPGDSTRQVVVRSGVVLGRGGGAMGHMLLPFRLGLGGPIGSGHQFFPWIHIGDLAGILTHALEANHVHGVLNGVAPSSATNAEFAQTLGAALGRRAFIPLPSAVVQAVFGRQRAIMLLEGQKVIPQRTLATGYQYSFPELGAALKEIVA

SEQ ID NO: 7247 - DNA, 2844 bp, Homo sapiens
agtcgctatgcgtgtgcttgtgggtgagggagggcagaaagggagagtgctgggcgggcttagtcggagattgaggactgggaatccgcttccgggagggcactgtctagtgcacaggcaacctggccttggcctcctagcccgagaagccgaatctccctaatccctgtgacctgtgtcacctctgcatcgcgaggagggggataagtggggagaagcctggtgtcagatgggatggcgccggaagagggtgccacagcggggacggaaggcgcccccaccccaactccacgggaatataaacaatttgtattttccgatcaggtggcgggacaggcttcattgggacagccctaacccagctgctgaatgccagaggccacgaagtgacgttggtctcccgaaagcccgggcccggccggatcacgtggatggaatgaaaccttccaaaaagaggtaatcggcagccgcctagagaccacccaattgctggctaaagccatcaccaaagccccacaaccccccaaggcctgggtcttagtcacaggtgtagcttactaccagcccagtctgactgcggagtatgatgaagacagcccaggaggggactttgactttttctccaacctcgtaaccaaatgggaagctgcagccaggcttcctggagattctacacgccaggtggtggtgcgctcaggggttgtgctgggccgtgggggtggtgccatgggccacatgctgctgccctttcgcctgggcctggggggccccatcggctcaggccaccaattcttcccctggatacacatcggggacctggcaggaatcctgacccatgcccttgaagcaaaccacgtgcacggggtcctgaatggagtggctccatcctccgccactaatgctgagtttgcccagaccttgggtgctgccctgggccgccgagccttcatccctctccccagcgctgtggtgcaagctgtctttgggcgacagcgtgccatcatgctgctggagggccagaaggtgatcccacagcgaacactggccactggctaccagtattccttcccagagctaggggctgccttaaaggaaattgtagcctaagtaggtcgtggcaagggcctgaggcctgttcctcacaggcttccaggttaggcactgtgaataggctcagctcctctagagagctgaagccatctggttcttagattcctctcccagtcctctttcccattgttctgttgctccaccttattgtctcaaggccgtaatctcatcaggttgggacattaatcttttcaactccttgtaagatttcccagtttggtttctctacatgtcctgcagctgccccacttctcctttacgctgtgtagagaatgctctgcagtttaggcaataaaaataaattgtctcactaaccttggctcatctctttggcctagattctcctgggatttacttcaaggaatgtcaccctagatgattcttccccaaagacggggttttgaaagttacaatgagcagtctctctcatcaccgtttcccttcttggtccttcagttgccaaaagaacttgtcacaagtttgggacatcaggttatgataaagatagacactagaagagagaatgatgatccatttccaatgggccctgtagtcaccctggatgctgtcagagtgccattaggatgccagtagaggaagaggtaaggcccaggtgtaggatagccttcagtctgtgtcaccaaatggcaagtgcattactaaccacacagtggtcccagtttatcaggctgcagcagaacaaagtcaacatccctgtctataagaagcttaggacttgcctctcatctgactggggccactcagtcaaccagggcccttagcacaaaagggcagaagacacttttggtctactgcacacccaccatcactgaaagtgaaaatggcaagaaaccaatcaagaagtataaacaaccctatcaggaaaaaaaaaaactccaaggttttcatctaggaccctttttacctacctaaagctgtgacatctgccataacttgaccagacacagttcccccagccaccagttcaggccatactaaccaatctcttctcagggaccgctgggttatctcttaatcattgtcacctctttgaccagcctgtctccaacacacctgcccccagcctgggtcagtatggtacagtggtgtaaatcaccaaaaaggaaggggtgaggacacaaggaccctccccatcatcattacactcgccatgcagtattcaactccctgtgccactcagagggaggcagaagtcagggcctggaaaagatcttgtctagagactccccacaggcccacacagaacagaacccaggggcacctgtcctacttctttatctggtcttggattccaggaagttgactggctctgtattgttcctggaggtatgaccagcctcaaaggtggatgtaacagaaaagcatactttaggctgcactaaagtaaggagtactgattaataccgtctacacagggaatgtgctaccctggagatagtaaattccctggcacaggaggacttcaagcagatccagggcaatgacctctaggaatcagggtgaagaaagcatgtcagtaacagcagagttggtctggtggccagtcaagtgccttccaactctggttctttcattttccagataattggttcatctagaaccaactggttcaacttccgttaagtcctcccatccccatacacacacacataaagcagaagtgtgccttgctttatgcaacatacgtcttccatagagaaaatgttagggtcg

SEQ ID NO: 7248 - protein, 76 aa, Homo sapiens
MGWRRKRVPQRGRKAPPPQLHGNINNLYFPIRWRDRLHWDSPNPAAECQRPRSDVGLPKARARPDHVDGMKPSKKR

SEQ ID NO: 7249 - DNA, 3012 bp, Homo sapiens
agtcgctatgcgtgtgcttgtgggtgagggagggcagaaagggagagtgctgggcgggcttagtcggagattgaggactgggaatccgcttccgggagggcactgtctagtgcacaggcaacctggccttggcctcctagcccgagaagccgaatctccctaatccctgtgacctgtgtcacctctgcatcgcgaggagggggataagtggggagaagcctggtgtcagatgggatggcgccggaagagggtgccacagcggggacggaaggcgcccccaccccaactccacgggaatataaacaatttgtattttccgatcaggtggcgggacaggcttcattgggacagccctaacccagctgctgaatgccagaggccacgaagtgacgttggtctcccgaaagcccgggcccggccggatcacgtgggtaagtccatcctctggaagcgggtgggagggcagagttgggcggcgcagggcggggcaggggcactgtgtgctttctccgacaggatgagctcgctgcatcggggctgccgagctgcgatgccgccgtcaacctggccggagagaacatcctcaaccctctccgaagatggaatgaaaccttccaaaaagaggtaatcggcagccgcctagagaccacccaattgctggctaaagccatcaccaaagccccacaaccccccaaggcctgggtcttagtcacaggtgtagcttactaccagcccagtctgactgcggagtatgatgaagacagcccaggaggggactttgactttttctccaacctcgtaaccaaatgggaagctgcagccaggcttcctggagattctacacgccaggtggtggtgcgctcaggggttgtgctgggccgtgggggtggtgccatgggccacatgctgctgccctttcgcctgggcctggggggccccatcggctcaggccaccaattcttcccctggatacacatcggggacctggcaggaatcctgacccatgcccttgaagcaaaccacgtgcacggggtcctgaatggagtggctccatcctccgccactaatgctgagtttgcccagaccttgggtgctgccctgggccgccgagccttcatccctctccccagcgctgtggtgcaagctgtctttgggcgacagcgtgccatcatgctgctggagggccagaaggtgatcccacagcgaacactggccactggctaccagtattccttcccagagctaggggctgccttaaaggaaattgtagcctaagtaggtcgtggcaagggcctgaggcctgttcctcacaggcttccaggttaggcactgtgaataggctcagctcctctagagagctgaagccatctggttcttagattcctctcccagtcctctttcccattgttctgttgctccaccttattgtctcaaggccgtaatctcatcaggttgggacattaatcttttcaactccttgtaagatttcccagtttggtttctctacatgtcctgcagctgccccacttctcctttacgctgtgtagagaatgctctgcagtttaggcaataaaaataaattgtctcactaaccttggctcatctctttggcctagattctcctgggatttacttcaaggaatgtcaccctagatgattcttccccaaagacggggttttgaaagttacaatgagcagtctctctcatcaccgtttcccttcttggtccttcagttgccaaaagaacttgtcacaagtttgggacatcaggttatgataaagatagacactagaagagagaatgatgatccatttccaatgggccctgtagtcaccctggatgctgtcagagtgccattaggatgccagtagaggaagaggtaaggcccaggtgtaggatagccttcagtctgtgtcaccaaatggcaagtgcattactaaccacacagtggtcccagtttatcaggctgcagcagaacaaagtcaacatccctgtctataagaagcttaggacttgcctctcatctgactggggccactcagtcaaccagggcccttagcacaaaagggcagaagacacttttggtctactgcacacccaccatcactgaaagtgaaaatggcaagaaaccaatcaagaagtataaacaaccctatcaggaaaaaaaaaaactccaaggttttcatctaggaccctttttacctacctaaagctgtgacatctgccataacttgaccagacacagttcccccagccaccagttcaggccatactaaccaatctcttctcagggaccgctgggttatctcttaatcattgtcacctctttgaccagcctgtctccaacacacctgcccccagcctgggtcagtatggtacagtggtgtaaatcaccaaaaaggaaggggtgaggacacaaggaccctccccatcatcattacactcgccatgcagtattcaactccctgtgccactcagagggaggcagaagtcagggcctggaaaagatcttgtctagagactccccacaggcccacacagaacagaacccaggggcacctgtcctacttctttatctggtcttggattccaggaagttgactggctctgtattgttcctggaggtatgaccagcctcaaaggtggatgtaacagaaaagcatactttaggctgcactaaagtaaggagtactgattaataccgtctacacagggaatgtgctaccctggagatagtaaattccctggcacaggaggacttcaagcagatccagggcaatgacctctaggaatcagggtgaagaaagcatgtcagtaacagcagagttggtctggtggccagtcaagtgccttccaactctggttctttcattttccagataattggttcatctagaaccaactggttcaacttccgttaagtcctcccatccccatacacacacacataaagcagaagtgtgccttgctttatgcaacatacgtcttccatagagaaaatgttagggtcg

SEQ ID NO: 7250 - protein, 132 aa, Homo sapiens
MGWRRKRVPQRGRKAPPPQLHGNINNLYFPIRWRDRLHWDSPNPAAECQRPRSDVGLPKARARPDHVGKSILWKRVGGQSWAAQGGAGALCAFSDRMSSLHRGCRAAMPPSTWPERTSSTLSEDGMKPSKKR

SEQ ID NO: 7251 - DNA, 1939 bp, Homo sapiens
gcttaagtcctcacgtataactcaggatgcccaggaaatgaatgccctttccctctacaggagacgttgactgtttctcttaagccgaaattcagggctttacaagaaattggtatgaaatagctcccaggaaaagacagagagagggatatgtgcacttatgtatttagtggctttttatttcccatgtttctcctgcagatggaatgaaaccttccaaaaagaggtaatcggcagccgcctagagaccacccaattgctggctaaagccatcaccaaagccccacaaccccccaaggcctgggtcttagtcacaggtgtaggtacgccccccaaatcaccagccccttatattcgccaggggaacggggtaactcagacctctgtagctatgcacacaccagagcactggtcttttccaggcaaaatgacttcctaggcccttgatccatgcatgtttctcctaacctttgtgtactttcactaagaaattgagaccctgaaaaaacagtggggagtggcatcactcaatgccagggaaaagtccacctatcccaaagtcccttacttctcacaccatagttctttaggaacagagttcctggtcacctttgggaccaagtaattgcaaacaattatacacaccagccactatttgaagtgttttatgcttattatcatttattccttacaacaaccctatgaggtaggtactattattcccattttaaagatgtgaaaattctatacagagaggttaagtaacttgcatcaagtcagagagttaataaatgagggagctgattaaaattcaggcgcctggtacccaagttcctgttcttaaccactacactctagcagcctctaagtttagccctgcaaccagagttcctccagggaaggaacgcttcaggtcatggagaagttcaaggggaaaatatccaaatggctctgtctccaaatggggagatcctaagggccagagaaggtgaggccaaggggagcctccactacagagagccaggcaggaccaaggacacccagggcaaatgattgtgttccaccggcagcttactaccagcccagtctgactgcggagtatgatgaagacagcccaggaggggactttgactttttctccaacctcgtaaccaaatgggaagctgcagccaggcttcctggagattctacacgccaggtggtggtgcgctcaggggttgtgctgggccgtgggggtggtgccatgggccacatgctgctgccctttcgcctgggcctggggggccccatcggctcaggccaccaattcttcccctggatacacatcggggacctggcaggaatcctgacccatgcccttgaagcaaaccacgtgcacggggtcctgaatggagtggctccatcctccgccactaatgctgagtttgcccagaccttgggtgctgccctgggccgccgagccttcatccctctccccagcgctgtggtgcaagctgtctttgggcgacagcgtgccatcatgctgctggagggccagaaggtgatcccacagcgaacactggccactggctaccagtattccttcccagagctaggggctgccttaaaggaaattgtagcctaagtaggtcgtggcaagggcctgaggcctgttcctcacaggcttccaggttaggcactgtgaataggctcagctcctctagagagctgaagccatctggttcttagattcctctcccagtcctctttcccattgttctgttgctccaccttattgtctcaaggccgtaatctcatcaggttgggacattaatcttttcaactccttgtaagatttcccagtttggtttctctacatgtcctgcagctgccccacttctcctttacgctgtgtagagaatgctctgcagtttaggcaataaaaataaattgtctcact

SEQ ID NO: 7252 - protein, 68 aa, Homo sapiens; identical to SEQ ID NO: 7228

SEQ ID NO: 7253 - DNA, 1558 bp, Homo sapiens
gggagggcagaaagggagagtgctgggcgggcttagtcggagattgaggactgggaatccgcttccgggagggcactgtctagtgcacaggcaacctggccttggcctcctagcccgagaagccgaatctccctaatccctgtgacctgtgtcacctctgcatcgcgaggagggggataagtggggagaagcctggtgtcagatgggatggcgccggaagagggtgccacagcggggacggaaggcgcccccaccccaactccacgggaatataaacaatttgtattttccgatcaggtggcgggacaggcttcattgggacagccctaacccagctgctgaatgccagaggccacgaagtgacgttggtctcccgaaagcccgggcccggccggatcacgtgggatgagctcgctgcatcggggctgccgagctgcgatgccgccgtcaacctggccggagagaacatcctcaaccctctccgaaggtcagcccgggccctaaagctgatacccactagagcacagggaggacagtgccccactgatgagaacctgtgagctatggatggaatgaaaccttccaaaaagaggtaatcggcagccgcctagagaccacccaattgctggctaaagccatcaccaaagccccacaaccccccaaggcctgggtcttagtcacaggtgtagcttactaccagcccagtctgactgcggagtatgatgaagacagcccaggaggggactttgactttttctccaacctcgtaaccaaatgggaagctgcagccaggcttcctggagattctacacgccaggtggtggtgcgctcaggggttgtgctgggccgtgggggtggtgccatgggccacatgctgctgccctttcgcctgggcctggggggccccatcggctcaggccaccaattcttcccctggatacacatcggggacctggcaggaatcctgacccatgcccttgaagcaaaccacgtgcacggggtcctgaatggagtggctccatcctccgccactaatgctgagtttgcccagaccttgggtgctgccctgggccgccgagccttcatccctctccccagcgctgtggtgcaagctgtctttgggcgacagcgtgccatcatgctgctggagggccagaaggtgatcccacagcgaacactggccactggctaccagtattccttcccagagctaggggctgccttaaaggaaattgtagcctaagtaggtcgtggcaagggcctgaggcctgttcctcacaggcttccaggttaggcactgtgaataggctcagctcctctagagagctgaagccatctggttcttagattcctctcccagtcctctttcccattgttctgttgctccaccttattgtctcaaggccgtaatctcatcaggttgggacattaatcttttcaactccttgtaagatttcccagtttggtttctctacatgtcctgcagctgccccacttctcctttacgctgtgtagagaatgctctgcagtttaggcaataaaaataaattgtctcact

SEQ ID NO: 7254 - protein, 68 aa, Homo sapiens; identical to SEQ ID NO: 7228

SEQ ID NO: 7255 - DNA, 1521 bp, Homo sapiens
gggagggcagaaagggagagtgctgggcgggcttagtcggagattgaggactgggaatccgcttccgggagggcactgtctagtgcacaggcaacctggccttggcctcctagcccgagaagccgaatctccctaatccctgtgacctgtgtcacctctgcatcgcgaggagggggataagtggggagaagcctggtgtcagatgggatggcgccggaagagggtgccacagcggggacggaaggcgcccccaccccaactccacgggaatataaacaatttgtattttccgatcaggtggcgggacaggcttcattgggacagccctaacccagctgctgaatgccagaggccacgaagtgacgttggtctcccgaaagcccgggcccggccggatcacgtgggtaagtccatcctctggaagcgggtgggagggcagagttgggcggcgcagggcggggcaggggcactgtgtgctttctccgacaggatgagctcgctgcatcggggctgccgagctgcgatgccgccgtcaacctggccggagagaacatcctcaaccctctccgaaggtcagcccgggccctaaagctgatacccactagagcacagggaggacagtgccccactgatgagaacctgtgagctatggcttactaccagcccagtctgactgcggagtatgatgaagacagcccaggaggggactttgactttttctccaacctcgtaaccaaatgggaagctgcagccaggcttcctggagattctacacgccaggtggtggtgcgctcaggggttgtgctgggccgtgggggtggtgccatgggccacatgctgctgccctttcgcctgggcctggggggccccatcggctcaggccaccaattcttcccctggatacacatcggggacctggcaggaatcctgacccatgcccttgaagcaaaccacgtgcacggggtcctgaatggagtggctccatcctccgccactaatgctgagtttgcccagaccttgggtgctgccctgggccgccgagccttcatccctctccccagcgctgtggtgcaagctgtctttgggcgacagcgtgccatcatgctgctggagggccagaaggtgatcccacagcgaacactggccactggctaccagtattccttcccagagctaggggctgccttaaaggaaattgtagcctaagtaggtcgtggcaagggcctgaggcctgttcctcacaggcttccaggttaggcactgtgaataggctcagctcctctagagagctgaagccatctggttcttagattcctctcccagtcctctttcccattgttctgttgctccaccttattgtctcaaggccgtaatctcatcaggttgggacattaatcttttcaactccttgtaagatttcccagtttggtttctctacatgtcctgcagctgccccacttctcctttacgctgtgtagagaatgctctgcagtttaggcaataaaaataaattgtctcact

SEQ ID NO: 7256 - protein, 185 aa, Homo sapiens; identical to SEQ ID NO: 7232

SEQ ID NO: 7257 - DNA, 1273 bp, Homo sapiens
gggagggcagaaagggagagtgctgggcgggcttagtcggagattgaggactgggaatccgcttccgggagggcactgtctagtgcacaggcaacctggccttggcctcctagcccgagaagccgaatctccctaatccctgtgacctgtgtcacctctgcatcgcgaggagggggataagtggggagaagcctggtgtcagatgggatggcgccggaagagggtgccacagcggggacggaaggcgcccccaccccaactccacgggaatataaacaatttgtattttccgatcaggtggcgggacaggcttcattgggacagccctaacccagctgctgaatgccagaggccacgaagtgacgttggtctcccgaaagcccgggcccggccggatcacgtggcttactaccagcccagtctgactgcggagtatgatgaagacagcccaggaggggactttgactttttctccaacctcgtaaccaaatgggaagctgcagccaggcttcctggagattctacacgccaggtggtggtgcgctcaggggttgtgctgggccgtgggggtggtgccatgggccacatgctgctgccctttcgcctgggcctggggggccccatcggctcaggccaccaattcttcccctggatacacatcggggacctggcaggaatcctgacccatgcccttgaagcaaaccacgtgcacggggtcctgaatggagtggctccatcctccgccactaatgctgagtttgcccagaccttgggtgctgccctgggccgccgagccttcatccctctccccagcgctgtggtgcaagctgtctttgggcgacagcgtgccatcatgctgctggagggccagaaggtgatcccacagcgaacactggccactggctaccagtattccttcccagagctaggggctgccttaaaggaaattgtagcctaagtaggtcgtggcaagggcctgaggcctgttcctcacaggcttccaggttaggcactgtgaataggctcagctcctctagagagctgaagccatctggttcttagattcctctcccagtcctctttcccattgttctgttgctccaccttattgtctcaaggccgtaatctcatcaggttgggacattaatcttttcaactccttgtaagatttcccagtttggtttctctacatgtcctgcagctgccccacttctcctttacgctgtgtagagaatgctctgcagtttaggcaataaaaataaattgtctcact

SEQ ID NO: 7258 - protein, 251 aa, Homo sapiens; identical to SEQ ID NO: 7240

SEQ ID NO: 7259 - DNA, 1949 bp, Homo sapiens
gtgagggagggcagaaagggagagtgctgggcgggcttagtcggagattgaggactgggaatccgcttccgggagggcactgtctagtgcacaggcaacctggccttggcctcctagcccgagaagccgaatctccctaatccctgtgacctgtgtcacctctgcatcgcgaggagggggataagtggggagaagcctggtgtcagatgggatggcgccggaagagggtgccacagcggggacggaaggcgcccccaccccaactccacgggaatataaacaatttgtattttccgatcaggtggcgggacaggcttcattgggacagccctaacccagctgctgaatgccagaggccacgaagtgacgttggtctcccgaaagcccgggcccggccggatcacgtgggtaagtccatcctctggaagcgggtgggagggcagagttgggcggcgcagggcggggcaggggcactgtgtgctttctccgacaggatgagctcgctgcatcggggctgccgagctgcgatgccgccgtcaacctggccggagagaacatcctcaaccctctccgaaggtcagcccgggccctaaagctgatacccactagagcacagggaggacagtgccccactgatgagaacctgtgagctatgggtaatggagctcccagattccgaactaaaccgatatcccagactactcattctgctccactcctccacccccacctgctcctccacccagtcagccaattggcttaagtcctcacgtataactcaggatgcccaggaaatgaatgccctttccctctacaggagacgttgactgtttctcttaagccgaaattcagggctttacaagaaattggtatgaaatagctcccaggaaaagacagagagagggatatgtgcacttatgtatttagtggctttttatttcccatgtttctcctgcagatggaatgaaaccttccaaaaagaggtaatcggcagccgcctagagaccacccaattgctggctaaagccatcaccaaagccccacaaccccccaaggcctgggtcttagtcacaggtgtagcttactaccagcccagtctgactgcggagtatgatgaagacagcccaggaggggactttgactttttctccaacctcgtaaccaaatgggaagctgcagccaggcttcctggagattctacacgccaggtggtggtgcgctcaggggttgtgctgggccgtgggggtggtgccatgggccacatgctgctgccctttcgcctgggcctggggggccccatcggctcaggccaccaattcttcccctggatacacatcggggacctggcaggaatcctgacccatgcccttgaagcaaaccacgtgcacggggtcctgaatggagtggctccatcctccgccactaatgctgagtttgcccagaccttgggtgctgccctgggccgccgagccttcatccctctccccagcgctgtggtgcaagctgtctttgggcgacagcgtgccatcatgctgctggagggccagaaggtgatcccacagcgaacactggccactggctaccagtattccttcccagagctaggggctgccttaaaggaaattgtagcctaagtaggtcgtggcaagggcctgaggcctgttcctcacaggcttccaggttaggcactgtgaataggctcagctcctctagagagctgaagccatctggttcttagattcctctcccagtcctctttcccattgttctgttgctccaccttattgtctcaaggccgtaatctcatcaggttgggacattaatcttttcaactccttgtaagatttcccagtttggtttctctacatgtcctgcagctgccccacttctcctttacgctgtgtagagaatgctctgcagtttaggcaataaaaataaattgtctcact

SEQ ID NO: 7260 - protein, 238 aa, Homo sapiens; identical to SEQ ID NO: 7242

SEQ ID NO: 7261 - DNA, 1110 bp, Homo sapiens
gtgtgcttgtgggtggcgggacaggcttcattgggacagccctaacccagctgctgaatgccagaggccacgaagtgacgttggtctcccgaaagcccgggcccggccggatcacgtggatggaatgaaaccttccaaaaagaggtaatcggcagccgcctagagaccacccaattgctggctaaagccatcaccaaagccccacaaccccccaaggcctgggtcttagtcacaggtgtagcttactaccagcccagtctgactgcggagtatgatgaagacagcccaggaggggactttgactttttctccaacctcgtaaccaaatgggaagctgcagccaggcttcctggagattctacacgccaggtggtggtgcgctcaggggttgtgctgggccgtgggggtggtgccatgggccacatgctgctgccctttcgcctgggcctggggggccccatcggctcaggccaccaattcttcccctggatacacatcggggacctggcaggaatcctgacccatgcccttgaagcaaaccacgtgcacggggtcctgaatggagtggctccatcctccgccactaatgctgagtttgcccagaccttgggtgctgccctgggccgccgagccttcatccctctccccagcgctgtggtgcaagctgtctttgggcgacagcgtgccatcatgctgctggagggccagaaggtgatcccacagcgaacactggccactggctaccagtattccttcccagagctaggggctgccttaaaggaaattgtagcctaagtaggtcgtggcaagggcctgaggcctgttcctcacaggcttccaggttaggcactgtgaataggctcagctcctctagagagctgaagccatctggttcttagattcctctcccagtcctctttcccattgttctgttgctccaccttattgtctcaaggccgtaatctcatcaggttgggacattaatcttttcaactccttgtaagatttcccagtttggtttctctacatgtcctgcagctgccccacttctcctttacgctgtgtagagaatgctctgcagtttaggcaataaaaataaattgtctcact

SEQ ID NO: 7262 - protein, 68 aa, Homo sapiens; identical to SEQ ID NO: 7228

SEQ ID NO: 7263 - DNA, 2336 bp, Homo sapiens
agtcgctatgcgtgtgcttgtgggtggcgggacaggcttcattgggacagccctaacccagctgctgaatgccagaggccacgaagtgacgttggtctcccgaaagcccgggcccggccggatcacgtgggtaagtccatcctctggaagcgggtgggagggcagagttgggcggcgcagggcggggcaggggcactgtgtgctttctccgacaggatgagctcgctgcatcggggctgccgagctgcgatgccgccgtcaacctggccggagagaacatcctcaaccctctccgaaggtcagcccgggccctaaagctgatacccactagagcacagggaggacagtgccccactgatgagaacctgtgagctatgggtaatggagctcccagattccgaactaaaccgatatcccagactactcattctgctccactcctccacccccacctgctcctccacccagtcagccaattggcttaagtcctcacgtataactcaggatgcccaggaaatgaatgccctttccctctacaggagacgttgactgtttctcttaagccgaaattcagggctttacaagaaattggtatgaaatagctcccaggaaaagacagagagagggatatgtgcacttatgtatttagtggctttttatttcccatgtttctcctgcagatggaatgaaaccttccaaaaagaggtaatcggcagccgcctagagaccacccaattgctggctaaagccatcaccaaagccccacaaccccccaaggcctgggtcttagtcacaggtgtaggtacgccccccaaatcaccagccccttatattcgccaggggaacggggtaactcagacctctgtagctatgcacacaccagagcactggtcttttccaggcaaaatgacttcctaggcccttgatccatgcatgtttctcctaacctttgtgtactttcactaagaaattgagaccctgaaaaaacagtggggagtggcatcactcaatgccagggaaaagtccacctatcccaaagtcccttacttctcacaccatagttctttaggaacagagttcctggtcacctttgggaccaagtaattgcaaacaattatacacaccagccactatttgaagtgttttatgcttattatcatttattccttacaacaaccctatgaggtaggtactattattcccattttaaagatgtgaaaattctatacagagaggttaagtaacttgcatcaagtcagagagttaataaatgagggagctgattaaaattcaggcgcctggtacccaagttcctgttcttaaccactacactctagcagcctctaagtttagccctgcaaccagagttcctccagggaaggaacgcttcaggtcatggagaagttcaaggggaaaatatccaaatggctctgtctccaaatggggagatcctaagggccagagaagcttactaccagcccagtctgactgcggagtatgatgaagacagcccaggaggggactttgactttttctccaacctcgtaaccaaatgggaagctgcagccaggcttcctggagattctacacgccaggtggtggtgcgctcaggggttgtgctgggccgtgggggtggtgccatgggccacatgctgctgccctttcgcctgggcctggggggccccatcggctcaggccaccaattcttcccctggatacacatcggggacctggcaggaatcctgacccatgcccttgaagcaaaccacgtgcacggggtcctgaatggagtggctccatcctccgccactaatgctgagtttgcccagaccttgggtgctgccctgggccgccgagccttcatccctctccccagcgctgtggtgcaagctgtctttgggcgacagcgtgccatcatgctgctggagggccagaaggtgatcccacagcgaacactggccactggctaccagtattccttcccagagctaggggctgccttaaaggaaattgtagcctaagtaggtcgtggcaagggcctgaggcctgttcctcacaggcttccaggttaggcactgtgaataggctcagctcctctagagagctgaagccatctggttcttagattcctctcccagtcctctttcccattgttctgttgctccaccttattgtctcaaggccgtaatctcatcaggttgggacattaatcttttcaactccttgtaagatttcccagtttggtttctctacatgtcctgcagctgccccacttctcctttacgctgtgtagagaatgctctgcagtttaggcaataaaaataaattgtctcact

SEQ ID NO: 7264 - protein, 198 aa, Homo sapiens; identical to SEQ ID NO: 7246

SEQ ID NO: 7265 - DNA, 1422 bp, Homo sapiens
agtcgctatgcgtgtgcttgtgggtgagggagggcagaaagggagagtgctgggcgggcttagtcggagattgaggactgggaatccgcttccgggagggcactgtctagtgcacaggcaacctggccttggcctcctagcccgagaagccgaatctccctaatccctgtgacctgtgtcacctctgcatcgcgaggagggggataagtggggagaagcctggtgtcagatgggatggcgccggaagagggtgccacagcggggacggaaggcgcccccaccccaactccacgggaatataaacaatttgtattttccgatcaggtggcgggacaggcttcattgggacagccctaacccagctgctgaatgccagaggccacgaagtgacgttggtctcccgaaagcccgggcccggccggatcacgtggatggaatgaaaccttccaaaaagaggtaatcggcagccgcctagagaccacccaattgctggctaaagccatcaccaaagccccacaaccccccaaggcctgggtcttagtcacaggtgtagcttactaccagcccagtctgactgcggagtatgatgaagacagcccaggaggggactttgactttttctccaacctcgtaaccaaatgggaagctgcagccaggcttcctggagattctacacgccaggtggtggtgcgctcaggggttgtgctgggccgtgggggtggtgccatgggccacatgctgctgccctttcgcctgggcctggggggccccatcggctcaggccaccaattcttcccctggatacacatcggggacctggcaggaatcctgacccatgcccttgaagcaaaccacgtgcacggggtcctgaatggagtggctccatcctccgccactaatgctgagtttgcccagaccttgggtgctgccctgggccgccgagccttcatccctctccccagcgctgtggtgcaagctgtctttgggcgacagcgtgccatcatgctgctggagggccagaaggtgatcccacagcgaacactggccactggctaccagtattccttcccagagctaggggctgccttaaaggaaattgtagcctaagtaggtcgtggcaagggcctgaggcctgttcctcacaggcttccaggttaggcactgtgaataggctcagctcctctagagagctgaagccatctggttcttagattcctctcccagtcctctttcccattgttctgttgctccaccttattgtctcaaggccgtaatctcatcaggttgggacattaatcttttcaactccttgtaagatttcccagtttggtttctctacatgtcctgcagctgccccacttctcctttacgctgtgtagagaatgctctgcagtttaggcaataaaaataaattgtctcact

SEQ ID NO: 7266 - protein, 76 aa, Homo sapiens; identical to SEQ ID NO: 7248

SEQ ID NO: 7267 - DNA, 1590 bp, Homo sapiens
agtcgctatgcgtgtgcttgtgggtgagggagggcagaaagggagagtgctgggcgggcttagtcggagattgaggactgggaatccgcttccgggagggcactgtctagtgcacaggcaacctggccttggcctcctagcccgagaagccgaatctccctaatccctgtgacctgtgtcacctctgcatcgcgaggagggggataagtggggagaagcctggtgtcagatgggatggcgccggaagagggtgccacagcggggacggaaggcgcccccaccccaactccacgggaatataaacaatttgtattttccgatcaggtggcgggacaggcttcattgggacagccctaacccagctgctgaatgccagaggccacgaagtgacgttggtctcccgaaagcccgggcccggccggatcacgtgggtaagtccatcctctggaagcgggtgggagggcagagttgggcggcgcagggcggggcaggggcactgtgtgctttctccgacaggatgagctcgctgcatcggggctgccgagctgcgatgccgccgtcaacctggccggagagaacatcctcaaccctctccgaagatggaatgaaaccttccaaaaagaggtaatcggcagccgcctagagaccacccaattgctggctaaagccatcaccaaagccccacaaccccccaaggcctgggtcttagtcacaggtgtagcttactaccagcccagtctgactgcggagtatgatgaagacagcccaggaggggactttgactttttctccaacctcgtaaccaaatgggaagctgcagccaggcttcctggagattctacacgccaggtggtggtgcgctcaggggttgtgctgggccgtgggggtggtgccatgggccacatgctgctgccctttcgcctgggcctggggggccccatcggctcaggccaccaattcttcccctggatacacatcggggacctggcaggaatcctgacccatgcccttgaagcaaaccacgtgcacggggtcctgaatggagtggctccatcctccgccactaatgctgagtttgcccagaccttgggtgctgccctgggccgccgagccttcatccctctccccagcgctgtggtgcaagctgtctttgggcgacagcgtgccatcatgctgctggagggccagaaggtgatcccacagcgaacactggccactggctaccagtattccttcccagagctaggggctgccttaaaggaaattgtagcctaagtaggtcgtggcaagggcctgaggcctgttcctcacaggcttccaggttaggcactgtgaataggctcagctcctctagagagctgaagccatctggttcttagattcctctcccagtcctctttcccattgttctgttgctccaccttattgtctcaaggccgtaatctcatcaggttgggacattaatcttttcaactccttgtaagatttcccagtttggtttctctacatgtcctgcagctgccccacttctcctttacgctgtgtagagaatgctctgcagtttaggcaataaaaataaattgtctcact

SEQ ID NO: 7268 - protein, 132 aa, Homo sapiens; identical to SEQ ID NO: 7250

SEQ ID NO: 7269 - DNA, 1505 bp, Homo sapiens
agtcgctatgcgtgtgcttgtgggtgagggagggcagaaagggagagtgctgggcgggcttagtcggagattgaggactgggaatccgcttccgggagggcactgtctagtgcacaggcaacctggccttggcctcctagcccgagaagccgaatctccctaatccctgtgacctgtgtcacctctgcatcgcgaggagggggataagtggggagaagcctggtgtcagatgggatggcgccggaagagggtgccacagcggggacggaaggcgcccccaccccaactccacgggaatataaacaatttgtattttccgatcaggtggcgggacaggcttcattgggacagccctaacccagctgctgaatgccagaggccacgaagtgacgttggtctcccgaaagcccgggcccggccggatcacgtgggatgagctcgctgcatcggggctgccgagctgcgatgccgccgtcaacctggccggagagaacatcctcaaccctctccgaagatggaatgaaaccttccaaaaagaggtaatcggcagccgcctagagaccacccaattgctggctaaagccatcaccaaagccccacaaccccccaaggcctgggtcttagtcacaggtgtagcttactaccagcccagtctgactgcggagtatgatgaagacagcccaggaggggactttgactttttctccaacctcgtaaccaaatgggaagctgcagccaggcttcctggagattctacacgccaggtggtggtgcgctcaggggttgtgctgggccgtgggggtggtgccatgggccacatgctgctgccctttcgcctgggcctggggggccccatcggctcaggccaccaattcttcccctggatacacatcggggacctggcaggaatcctgacccatgcccttgaagcaaaccacgtgcacggggtcctgaatggagtggctccatcctccgccactaatgctgagtttgcccagaccttgggtgctgccctgggccgccgagccttcatccctctccccagcgctgtggtgcaagctgtctttgggcgacagcgtgccatcatgctgctggagggccagaaggtgatcccacagcgaacactggccactggctaccagtattccttcccagagctaggggctgccttaaaggaaattgtagcctaagtaggtcgtggcaagggcctgaggcctgttcctcacaggcttccaggttaggcactgtgaataggctcagctcctctagagagctgaagccatctggttcttagattcctctcccagtcctctttcccattgttctgttgctccaccttattgtctcaaggccgtaatctcatcaggttgggacattaatcttttcaactccttgtaagatttcccagtttggtttctctacatgtcctgcagctgccccacttctcctttacgctgtgtagagaatgctctgcagtttaggcaataaaaataaattgtctcact

SEQ ID NO: 7270 - protein, 68 aa, Homo sapiens; identical to SEQ ID NO: 7228

SEQ ID NO: 7271 - DNA, 1463 bp, Homo sapiens
agtcgctatgcgtgtgcttgtgggtgagggagggcagaaagggagagtgctgggcgggcttagtcggagattgaggactgggaatccgcttccgggagggcactgtctagtgcacaggcaacctggccttggcctcctagcccgagaagccgaatctccctaatccctgtgacctgtgtcacctctgcatcgcgaggagggggataagtggggagaagcctggtgtcagatgggatggcgccggaagagggtgccacagcggggacggaaggcgcccccaccccaactccacgggaatataaacaatttgtattttccgatcaggtggcgggacaggcttcattgggacagccctaacccagctgctgaatgccagaggccacgaagtgacgttggtctcccgaaagcccgggcccggccggatcacgtgggatgagctcgctgcatcggggctgccgagctgcgatgccgccgtcaacctggccggagagaacatcctcaaccctctccgaaggtcagcccgggccctaaagctgatacccactagagcacagggaggacagtgccccactgatgagaacctgtgagctatggcttactaccagcccagtctgactgcggagtatgatgaagacagcccaggaggggactttgactttttctccaacctcgtaaccaaatgggaagctgcagccaggcttcctggagattctacacgccaggtggtggtgcgctcaggggttgtgctgggccgtgggggtggtgccatgggccacatgctgctgccctttcgcctgggcctggggggccccatcggctcaggccaccaattcttcccctggatacacatcggggacctggcaggaatcctgacccatgcccttgaagcaaaccacgtgcacggggtcctgaatggagtggctccatcctccgccactaatgctgagtttgcccagaccttgggtgctgccctgggccgccgagccttcatccctctccccagcgctgtggtgcaagctgtctttgggcgacagcgtgccatcatgctgctggagggccagaaggtgatcccacagcgaacactggccactggctaccagtattccttcccagagctaggggctgccttaaaggaaattgtagcctaagtaggtcgtggcaagggcctgaggcctgttcctcacaggcttccaggttaggcactgtgaataggctcagctcctctagagagctgaagccatctggttcttagattcctctcccagtcctctttcccattgttctgttgctccaccttattgtctcaaggccgtaatctcatcaggttgggacattaatcttttcaactccttgtaagatttcccagtttggtttctctacatgtcctgcagctgccccacttctcctttacgctgtgtagagaatgctctgcagtttaggcaataaaaataaattgtctcact

SEQ ID NO: 7272 - protein, 185 aa, Homo sapiens; identical to SEQ ID NO: 7232

SEQ ID NO: 7273 - DNA, 1229 bp, Homo sapiens
actttacgcaggcgcgttaggtcctagtcgctatgcgtgtgcttgtgggtggcgggacaggcttcattgggacagccctaacccagctgctgaatgccagaggccacgaagtgacgttggtctcccgaaagcccgggcccggccggatcacgtgggatgagctcgctgcatcggggctgccgagctgcgatgccgccgtcaacctggccggagagaacatcctcaaccctctccgaagatggaatgaaaccttccaaaaagaggtaatcggcagccgcctagagaccacccaattgctggctaaagccatcaccaaagccccacaaccccccaaggcctgggtcttagtcacaggtgtagcttactaccagcccagtctgactgcggagtatgatgaagacagcccaggaggggactttgactttttctccaacctcgtaaccaaatgggaagctgcagccaggcttcctggagattctacacgccaggtggtggtgcgctcaggggttgtgctgggccgtgggggtggtgccatgggccacatgctgctgccctttcgcctgggcctggggggccccatcggctcaggccaccaattcttcccctggatacacatcggggacctggcaggaatcctgacccatgcccttgaagcaaaccacgtgcacggggtcctgaatggagtggctccatcctccgccactaatgctgagtttgcccagaccttgggtgctgccctgggccgccgagccttcatccctctccccagcgctgtggtgcaagctgtctttgggcgacagcgtgccatcatgctgctggagggccagaaggtgatcccacagcgaacactggccactggctaccagtattccttcccagagctaggggctgccttaaaggaaattgtagcctaagtaggtcgtggcaagggcctgaggcctgttcctcacaggcttccaggttaggcactgtgaataggctcagctcctctagagagctgaagccatctggttcttagattcctctcccagtcctctttcccattgttctgttgctccaccttattgtctcaaggccgtaatctcatcaggttgggacattaatcttttcaactccttgtaagatttcccagtttggtttctctacatgtcctgcagctgccccacttctcctttacgctgtgtagagaatgctctgcagtttaggcaataaaaataaattgtctcact

SEQ ID NO: 7274 - protein, 293 aa, Homo sapiens; identical to SEQ ID NO: 7234

SEQ ID NO: 7275 - DNA, 2117 bp, Homo sapiens
agcgaggtgggagggattagaccgatggacccggaaagggcggaggagggaaggctttagtgtagaaaaccaaccaaaccaaacccaaaccaacaaaacccttcacctaaaacccgaagctacccagacctcagaattttggatgtctattaagttggcgggtcagtaatgcaagagaacccttccaccggatctgacgcactaagaaggctagacagtttgaaaagagcccctatcaaagcaacctgaattctgctaaaattgaagcaagaacaaacatggagtttctggtgaagaatgatgaaattgatgccttatgaaaagtttatgaggacaatgccccaaataaatcatcagtctacaaatgcataactcattttaagaaacgaggagatggacaagcatggtggctcatgcctgtaatcccagcactttgggaggattatgcacgagcctctctcaagcccaggagtttgagaccagcctgggcaacatagcgagacctcatctcactaaaaatttaaaaattagccaagtgtggtggtgcacacctgtagttccagcgtcttgggaggctgaggcaggaggattgcttgagcccagcagttcaaggttgcagtgagctatgattgcaccaccgtgctgcagcctgggtaacagagtgagaacctgtctcaacaaaaaggggaggagatgatgttgaagatacagatagtggcagactatccacatcactttgtgaggaaaaaaattcatcttgtttgtgccctaattgaagagaactgacaacagcagaaacaatagccaacaccatagacatctcagttgggtcagtttacacaattctgactgaaaagttacagtggagcaaactttcaactcgataggtaacaaaactgttgtacccagatctgctacagttaagaggagagctttcagtggaaagtttaaacaagtggggtcaagatccttgatatggctttgtgacctcacccaaatctcatcttgaattgtaatccccagctattgagggaaagacctggtgggaggtgattggatcatgggggcagtttcccccatgctgtcctcatgatagtgagggtgttcccatgagatctgatggttttataagtagcagtttcctgtgggcttttcacttactgtttttcctgccaccatgtgaagaaggtctttgcttcccctttgccttccaccatgattataagtttcctgaggcctcctgggacatgcggaattgtgactcaattaaacctgttttctttataaattacccagtccccagcagttctttatagaagtgtgaaaacagactaatacaatcctgaagcatttcatcaaagaattgtaacaggagatgaaatatggcttcaccagtatgatcctgaagaaaaagcacaatcaaagcaatgtctatcaagcggaggaagtcaaagcaaagcagaccagtcaagagcaaaggttggagtggctctggtgacaactcactctgttctcatggtcacaaatccctgctcactgctgccactgctgctgccaccacagaccaagagctccacttgcacagtgctgctggctaagaagaagttgctgtacctgagcactggaccacatggactcacagagactcccaaccaagtaaaggggtgatatggcttgtggatgtcaaccatattctcttcttgatcacctcgctgctggaacaatgggccatggtcagagtagagtggtcatggaggttgaatagatgccatgaatgggtccaagaacatggacactctctttcaccaaaatcaattcgggtcttgccactgttaatcacctaacttgccaacagcagagactatcgctgagtctttgagatggcactgctcttggagagatcaggcagccatccagtgagaggttgacccctctgctttggaggggatggacattcatccttatcaccattgatacttgctctagacatgagttttccttctctgcctgaaattcctctgccactaccaccatatgagggcttacagatttcccaatccatcaacctgcttctcacacacattagctcagagtaaaggactcattttatggcaaag

SEQ ID NO: 7276 - protein, 56 aa, Homo sapiens
MSIKRRKSKQSRPVKSKGWSGSGDNSLCSHGHKSLLTAATAAATTDQELHLHSAAG

SEQ ID NO: 7277 - DNA, 696 bp, Homo sapiens
tcatggtcacaaatccctgctcactgctgccactgctgctgccaccacagaccaagagctccacttgcacagtgctgctggctaagaagaagttgctgtacctgagcactggaccacatggactcacagagactcccaaccaagagctgatactgcagatttcagagggaagaaccctgatactcaccagcttcagctctggagcacaagagaaagagcagcagggggagaggaagaagcagcatcttcccagagaggctgcctgagcaaatgctggttttcctttccagtcttgggttttataactcccagaaggcaagagaggggcaaggctggtaaccacaggaactgcatggtcacgttttcttctctcactctgaattggctgtttctgatcagaagttcccctagaatcacccagtgtttttctagaaaggaacttgagccctgaactcccaagtgctggcttctcagatgtaccctcaactatggtgacttttctggagttgggggcaggaaatggagggaccatgtttttctttcccaattagggcagcttgtgaaaggcccactgaacgttcagtgcaaagacttttatggctatgttccatagtcagaaatgcatattgcagagtcccagtgcatgcacatatgtatgtgtgagtatgtaagcacaaattaaaggtttcaggaaac

SEQ ID NO: 7278 - protein, 87 aa, Homo sapiens
MVTNPCSLLPLLLPPQTKSSTCTVLLAKKKLLYLSTGPHGLTETPNQELILQISEGRTLILTSFSSGAQEKEQQGERKKQHLPREAA

SEQ ID NO: 7279 - DNA, 932 bp, Homo sapiens
agcatttgctcaggcagcctctctgggaagatgctgcttcttcctctccccctgctgctctttctcttgtgctccagagctgaagctggggagatcatcgggggcacagaatgcaagccacattcccgcccctacatggcctacctggaaattgtaacttccaacggtccctcaaaattttgtggtggtttccttataagacggaactttgtgctgacggctgctcattgtgcaggaaggtctataacagtcacccttggagcccataacataacagaggaagaagacacatggcagaagcttgaggttataaagcaattccgtcatccaaaatataacacttctactcttcaccacgatatcatgttactaaagttgaaggagaaagccagcctgaccctggctgtggggacactccccttcccatcccaattcaactttgtcccacctgggagaatgtgccgggtggctggctggggaagaacaggtgtgttgaagccgggctcagacactctgcaagaggtgaagctgagactcatggatccccaggcctgcagccacttcagagactttgaccacaatcttcagctgtgtgtgggcaatcccaggaagacaaaatctgcatttaagggagactctgggggccctcttctgtgtgctggggtggcccagggcatcgtatcctatggacggtcggatgcaaagccccctgctgtcttcacccgaatctcccattaccggccctggatcaaccagatcctgcaggcaaattaatcctggatcctgagccagcctgaaagggaagctggaactggacctgagcagcaaagtgtgtgccactcattctggtctacccttggtccctcagccacaaccctaagcctccagaagtatcctacaggtcacagaactctcaataaacctcagtgaag

SEQ ID NO: 7280 - protein, 247 aa, Homo sapiens; identical to SEQ ID NO: 996

SEQ ID NO: 7281 - DNA, 924 bp, Homo sapiens; identical to SEQ ID NO: 997

SEQ ID NO: 7282 - protein, 255 aa, Homo sapiens; identical to SEQ ID NO: 998

SEQ ID NO: 7283 - DNA, 886 bp, Homo sapiens
gcacagcagcaactgactgggcagcctttcaggaaagatgcagccactcctgcttctgctggcctttctcctacccactggggctgaggcaggggagatcatcggaggccgggagagcaggccccactcccgcccctacatggcgtatcttcagatccagagtccagcaggtcagagcagatgtggagggttcctggtgcgagaagactttgtgctgacagcagctcattgctggggaagcaatataaatgtcaccctgggcgcccacaatatccagagacgggaaaacacccagcaacacatcactgcgcgcagagccatccgccaccctcaatataatcagcggaccatccagaatgacatcatgttattgcagctgagcagaagagtcagacggaatcgaaacgtgaacccagtggctctgcctagagcccaggagggactgagacccgggacgctgtgcactgtggccggctggggcagggtcagcatgaggaggggaacagatacactccgagaggtgcagctgagagtgcagagggataggcagtgcctccgcatcttcggttcctacgacccccgaaggcagatttgtgtgggggaccggcgggaacggaaggctgccttcaagggggattccggaggccccctgctgtgtaacaatgtggcccacggcatcgtctcctatggaaagtcgtcaggggttcctccagaagtcttcaccagggtctcaagtttcctgccctggataaggacaacaatgagaagcttcaaactgctggatcagatggagacccccctgtgactgactcttcttctcggggacacaggccagctccacagtgttgccagagccttaataaacgtccacagagtataaataacc

SEQ ID NO: 7284 - protein, 255 aa, Homo sapiens; identical to SEQ ID NO: 998

SEQ ID NO: 7285 - DNA, 984 bp, Homo sapiens
ggggacaagtctaggaggtctctgagtttactgtacccatccctccttcatctccctccagcatttgtttctggaaggagtcaacaccaacagctctgacctgggcagccttcctgagaaaatgcagccattcctcctcctgttggcctttcttctgacccctggggctgggacagaggagatcatcgggggccatgaggccaagccccactcccgcccctacatggcctttgttcagtttctgcaagagaagagtcggaagaggtgtggcggcatcctagtgagaaaggactttgtgctgacagctgctcactgccagggaagctccataaatgtcaccttgggggcccacaatatcaaggaacaggagcggacccagcagtttatccctgtgaaaagacccatcccccatccagcctataatcctaagaacttctccaacgacatcatgctactgcagctggagagaaaggccaagtggaccacagctgtgcggcctctcaggctacctagcagcaaggcccaggtgaagccagggcagctgtgcagtgtggctggctggggttatgtctcaatgagcactttagcaaccacactgcaggaagtgttgctgacagtgcagaaggactgccagtgtgaacgtctcttccatggcaattacagcagagccactgagatttgtgtgggggatccaaagaagacacagaccggtttcaagggggactccggggggcccctcgtgtgtaaggacgtagcccaaggtattctctcctatggaaacaaaaaagggacacctccaggagtctacatcaaggtctcacacttcctgccctggataaagagaacaatgaagcgcctctaacagcaggcatgagactaaccttcctctgggcctgaccatctctgggacagaggcaagaatccccaaggggtgggcagtcggggttgcaggactgtaataaatggatctctggtgtaaatatg

SEQ ID NO: 7286 - protein, 246 aa, Homo sapiens; identical to SEQ ID NO: 1000

SEQ ID NO: 7287 - DNA, 790 bp, Homo sapiens
ggggacaagtctaggaggtctctgagtttactgtacccatccctccttcatctccctccagcatttgtttctggaaggagtcaacaccaacagctctgacctgggcagccttcctgagaaaatgcagccattcctcctcctgttggcctttcttctgacccctggggctgggacagaggagatcatcgggggccatgaggccaagccccactcccgcccctacatggcctttgttcagtttctgcaagagaagagtcggaagaggtgtggcggcatcctagtgagaaaggactttgtgctgacagctgctcactgccagggaagctccataaatgtcaccttgggggcccacaatatcaaggaacaggagcggacccagcagtttatccctgtgaaaagacccatcccccatccagcctataatcctaagaacttctccaacgacatcatgctactgcagctggagagaaaggccaagtggaccacagctgtgcggcctctcaggctacctagcagcaaggcccagggggactccggggggcccctcgtgtgtaaggacgtagcccaaggtattctctcctatggaaacaaaaaagggacacctccaggagtctacatcaaggtctcacacttcctgccctggataaagagaacaatgaagcgcctctaacagcaggcatgagactaaccttcctctgggcctgaccatctctgggacagaggcaagaatccccaaggggtgggcagtcggggttgcaggactgtaataaatggatctctggtgtaaata

SEQ ID NO: 7288 - protein, 182 aa, Homo sapiens
MQPFLLLLAFLLTPGAGTEEIIGGHEAKPHSRPYMAFVQFLQEKSRKRCGGILVRKDFVLTAAHCQGSSINVTLGAHNIKEQERTQQFIPVKRPIPHPAYNPKNFSNDIMLLQLERKAKWTTAVRPLRLPSSKAQGDSGGPLVCKDVAQGILSYGNKKGTPPGVYIKVSHFLPWIKRTMKRL

SEQ ID NO: 7289 - DNA, 588 bp, Homo sapiens
ggggacaagtctaggaggtctctgagtttactgtacccatccctccttcatctccctccagcatttgtttctggaaggagtcaacaccaacagctctgacctgggcagccttcctgagaaaatgcagccattcctcctcctgttggcctttcttctgacccctggggctgggacagaggagatcatcgggggccatgaggccaagccccactcccgcccctacatggcctttgttcagtttctgcaagagaagagtcggaagaggtgtggcggcatcctagtgagaaaggactttgtgctgacagctgctcactgccagggaagggggactccggggggcccctcgtgtgtaaggacgtagcccaaggtattctctcctatggaaacaaaaaagggacacctccaggagtctacatcaaggtctcacacttcctgccctggataaagagaacaatgaagcgcctctaacagcaggcatgagactaaccttcctctgggcctgaccatctctgggacagaggcaagaatccccaaggggtgggcagtcggggttgcaggactgtaataaatggatctctggtgtaaata

SEQ ID NO: 7290 - protein, 79 aa, Homo sapiens
MQPFLLLLAFLLTPGAGTEEIIGGHEAKPHSRPYMAFVQFLQEKSRKRCGGILVRKDFVLTAAHCQGRGTPGGPSCVRT

SEQ ID NO: 7291 - DNA, 577 bp, Homo sapiens
atgcaaccaatcctgcttctgctggccttcctcctgctgcccagggcagatgcagctggagagaaaggccaagcggaccagagctgtgcagcccctcaggctacctagcaacaaggcccaggtgaagccagggcagacatgcagtgtggccggctgggggcagacggcccccctgggaaaacactcacacacactacaagaggtgaagatgacagtgcaggaagatcgaaagtgcgaatctgacttacgccattattacgacagtaccattgagttgtgcgtgggggacccagagattaaaaagacttcctttaagggggactctggaggccctcttgtgtgtaacaaggtggcccagggcattgtctcctatggacgaaacaatggcatgcctccacgagcctgcaccaaagtctcaagctttgtacactggataaagaaaaccatgaaacgctactaactacaggaagcaaactaagcccccgctgtaatgaaacaccttctctggagccaagtccagatttacactgggagaggtgccagcaactgaataaatacctcttagctgagtggaaaa

SEQ ID NO: 7292 - protein, 136 aa, Homo sapiens
MQLERKAKRTRAVQPLRLPSNKAQVKPGQTCSVAGWGQTAPLGKHSHTLQEVKMTVQEDRKCESDLRHYYDSTIELCVGDPEIKKTSFKGDSGGPLVCNKVAQGIVSYGRNNGMPPRACTKVSSFVHWIKKTMKRY

SEQ ID NO: 7293 - DNA, 744 bp, Homo sapiens
gggcagccttcctgagaagatgcaaccaatcctgcttctgctggccttcctcctgctgcccagggcagatgcaggggagatcatcgggggacatgaggccaagccccactcccgcccctacatggcttatcttatgatctgggatcagaagtctctgaagaggtgcggtggcttcctgatacgagacgacttcgtgctgacagctgctcactgttggggaagctggagagaaaggccaagcggaccagagctgtgcagcccctcaggctacctagcaacaaggcccaggtgaagccagggcagacatgcagtgtggccggctgggggcagacggcccccctgggaaaacactcacacacactacaagaggtgaagatgacagtgcaggaagatcgaaagtgcgaatctgacttacgccattattacgacagtaccattgagttgtgcgtgggggacccagagattaaaaagacttcctttaagggggactctggaggccctcttgtgtgtaacaaggtggcccagggcattgtctcctatggacgaaacaatggcatgcctccacgagcctgcaccaaagtctcaagctttgtacactggataaagaaaaccatgaaacgctactaactacaggaagcaaactaagcccccgctgtaatgaaacaccttctctggagccaagtccagatttacactgggagaggtgccagcaactgaataaatacctcttagctgagtggaaaa

SEQ ID NO: 7294 - protein, 90 aa, Homo sapiens
MQPILLLLAFLLLPRADAGEIIGGHEAKPHSRPYMAYLMIWDQKSLKRCGGFLIRDDFVLTAAHCWGSWRERPSGPELCSPSGYLATRPR

SEQ ID NO: 7295 - DNA, 928 bp, Homo sapiens
cccaagagctaaaagagagcaaggaggaaacaacagcagctccaaccagggcagccttcctgagaagatgcaaccaatcctgcttctgctggccttcctcctgctgcccagggcagatgcaggggagatcatcgggggacatgaggccaagccccactcccgcccctacatggcttatcttatgatctgggatcagaagtctctgaagaggtgcggtggcttcctgatacgagacgacttcgtgctgacagctgctcactgttggggaagctccataaatgtcaccttgggggcccacaatatcaaagaacaggagccgacccagcagtttatccctgtgaaaagacccatcccccatccagcctataatcctaagaacttctccaacgacatcatgctactgcagctggagagaaaggccaagcggaccagagctgtgcagcccctcaggctacctagcaacaaggcccaggtgaagccagggcagacatgcagtgtggccggctgggggcagacggcccccctgggaaaacactcacacacactacaagaggtgaagatgacagtgcaggaagatcgaaagtgcgaatctgacttacgccattattacgacagtaccattgagttgtgcgtgggggacccagagattaaaaagacttcctttaagggggactctggaggccctcttgtgtgtaacaaggtggcccagggcattgtctcctatggacgaaacaatggcatgcctccacgagcctgcaccaaagtctcaagctttgtacactggataaagaaaaccatgaaacgctactaactacaggaagcaaactaagcccccgctgtaatgaaacaccttctctggagccaagtccagatttacactgggagaggtgccagcaactgaataaatacctcttagctgagtggaaaa

SEQ ID NO: 7296 - protein, 247 aa, Homo sapiens
MQPILLLLAFLLLPRADAGEIIGGHEAKPHSRPYMAYLMIWDQKSLKRCGGFLIRDDFVLTAAHCWGSSINVTLGAHNIKEQEPTQQFIPVKRPIPHPAYNPKNFSNDIMLLQLERKAKRTRAVQPLRLPSNKAQVKPGQTCSVAGWGQTAPLGKHSHTLQEVKMTVQEDRKCESDLRHYYDSTIELCVGDPEIKKTSFKGDSGGPLVCNKVAQGIVSYGRNNGMPPRACTKVSSFVHWIKKTMKRY

SEQ ID NO: 7297 - DNA, 819 bp, Homo sapiens
aacagcagctccaaccagggcagccttcctgagaagatgcaaccaatcctgcttctgctggccttcctcctgctgcccagggcagatgcaggggagatcatcgggggacatgaggccaagccccactcccgcccctacatggcttatcttatgatctgggatcagaagtctctgaagaggtgcggtggcttcctgatacgagacgacttcgtgctgacagctgctcactgttggggaagctggagagaaaggccaagcggaccagagctgtgcagcccctcaggctacctagcaacaaggcccaggtgaagccagggcagacatgcagtgtggccggctgggggcagacggcccccctgggaaaacactcacacacactacaagaggtgaagatgacagtgcaggaagatcgaaagtgcgaatctgacttacgccattattacgacagtaccattgagttgtgcgtgggggacccagagattaaaaagacttcctttaaggtaagactatgcacctgcctggattggctcttgggagaaagatgtttggggaatatctgagacctggagactcaagtagtgggggactccttcacccactagactgtgatatttctctctggaaagagaagaggggactagactgagctggggagaaattagggcctctgcaaacttaccaggaggcttatggtggatggtgcttctttggaaggatgaatttgcaacactccacccactccaggtcacagatattaggaaactgtgcccactgggggtgcagtaattataaccaggtgtgtcttcagaggctggtacc

SEQ ID NO: 7298 - protein, 90 aa, Homo sapiens; identical to SEQ ID NO: 7294

SEQ ID NO: 7299 - DNA, 718 bp, Homo sapiens
tatgacatctacttgtggacacactctgctttctggtttttctgtttctgattagaaactcaaaaacaatatgagaaacatacctgaaaacagcagaagatctggatcattccggccagcaattcaaagtctgccaaagggaaatcaagtattgtagaaacctacggggcctctcagagcattttaccagaactgtggcaggtcctcacaggggaagaaagtcttgtccaaagatggcgtctaccctgtgctccactgtgtatcccagaggagagcatctttactgtggaatggacttccagctgactcatgttggggaaaggaagcaacacaggagcttaagaggaaaattgaaagaaaccacagaccctttgaaagaagtggcaaactgcagcttacaccatgagccaggcagaaaactctgagtcctcagagtgtgaaaggaagagaaactgcctctgggatatgcactcccactggggaacctggcaatccaggccacggggaagaccttaaccctacccagtgctggagctgatttaatgagctgaggggagtatatgagaaggagcagcttcaggatgtgctttgcttgcactcctagactctactggggacagagggaagccattcctgatcctacctcacagaggaccatgcagaagtcagccaactagctcaggcggtggccatgggctgagaggagtgagaagctccc

SEQ ID NO: 7300 - protein, 63 aa, Homo sapiens
MASTLCSTVYPRGEHLYCGMDFQLTHVGERKQHRSLRGKLKETTDPLKEVANCSLHHEPGRKL

SEQ ID NO: 7301 - DNA, 4403 bp, Homo sapiens
ccaggctgcacggtaggaccggggcgaggggagccaggcggtcagggcggaggccaagcccgggagatgcggttgcagccgccacggctgttggggcgcctggcgctccgtccgaggcgggtggctgtgaggccaggggagtaggcaggctcccagagagattcttccaagttggcgggtggcgggagagggggccgcgcgccccggcgcagctgctttgtgcgcgcagagagggactcgtgtccctggttctctccaaccctgggacccgttgtgcgggcagtattgggcaagccgcagaacggagcgatttcctccgagaaagttgaggatggagcctttttttccgcaccgtccccgcgatggcatgggccccgagaatgctgccccgaggctcccagtgtgggggagctcggggtcgctgcgcctctagcttgagcgcagaaatccgcgaatcactccgatcttcgcgaactctggcatcttctaggaaaatcattactgccaaaactgaggcgagcttttctggcgggcacggcaccctgcccccagggcgctggccctgggcgatgccccctttccgatctcaggcttggtcaagggcgccaggttccgaattcgcgcttgccgtgcacgccggcatcgagcctcaccaacaccgccgggcaacgtggctggagtagattcactgcgtgctgtcctcacttgttctacaatgagtgccaaatctgctatcagcaaggaaatttttgcacctcttgatgaaaggatgctgggagctgtccaagtcaagaggaggacaaagaaaaagattcctttcttggcaactggaggtcaaggcgaatatttaacttatatctgcctgtcagtgacaaacaagaaacccacacaggcgtccatcacaaaggtcaaacagtttgaaggctccacatcatttgttcggagatcacagtggatgctcgagcagcttcgccaggttaatggtatcgatcctaatggggattcggcagagtttgatttgttgtttgaaaatgcttttgaccagtgggtagccagcacagcgtcagaaaaatgcaccttcttccagatcctccaccatacctgccagaggtacctcacggacaggaagccagagtttattaactgccaatccaaaattatgggaggaaacagcatcctccattcagctgctgacagcgtgaccagcgcagtgcagaaggcaagccaggccttgaatgagcgtggagagcgattaggccgagcagaggagaagacagaagacctgaagaacagcgcccagcagtttgcagaaactgcgcacaagcttgccatgaagcacaaatgttgagaaactgcctatcctggtgactcttcttaagagaaactgaagagtttgttcagcagtttttacaagaattcgggacctccgcttgcttctttttttccaatatttggacacttagagtggtttttgttttttcttttcagatgttaatgtgaaagaaagggtgttgcatttttacatttccctaatgatcttgctaataaatgctacaatagcatcagcttcattttgggtttttgcctcctcccactgtgtgtatgtgtgtatatgtatgttttgaatatgttttctttattaaaaaatattttttgtagtttgaatatgaaatttggaccaaatgataaactgcgctgagtctaaactggcaacatgtatttttttctctgatattaagcaggaaggcattttaatgtggtgacatcagatgttatttttcctagatgaaaataaaagtcaagcagtgattagtttcactcactgtcctagctacacttaatttgaagattaaaattctacattgtggaaaacaattgaatttattgggaaaaacagcagtcttagattttgctccttgcatagtaatcttttgcatgaaccatcaccagcgttcaaaaaaaaaaaaaaatcagaatcgcagatagaaatctctttcctgagttacagtttaaatactcttgctacttgtatccagggtgtttacttggaattatcatatgaagggtaaaaatttgagagtaaagccctaaagaaaagcctacctaaaaccctctgtgtactcacagatgtttctcttgtcactgtcatagtgatggtcgctggtatggaaaagtgcttatatttttatcaaaaaattgatttgtccaggtaaaggtctgtgtcaatgataatgtgaacaagtagtacatttaaaatgtttgtcttgtctttttacagtcatgcctattttagagacaccttcataatgtccttgggagagggcctttagtttcttggtatctggattttggaggttttgatgttgtttttgctatctatttatttaatgtaatttaatatgtgagtttcttgacaaattgcatttcatggcaattgcaccttgcctggtctgatataaaacaccacaatcacaaacctttacattgcagtcagtttcaatacagttggtcacacacctcgtgattttctattactcaagataataaggggcttagggtctagaagttctgtttcctagagggttaaaatgctaaacataaaaaaagctgtgctttttttgtgaaactaggagacaagctgcacatctcagacacattgtaagcctaccactgcagcgcattgatttttaagctgcctgaatcttcaggacccctatctattccatcctatccattttgctgattgagtcgatatgtattgcagcctcttacataggagcataagatgacttttggattgttaatactgatttaaatagctgaagttctcctaataaagcattcccaaggagagagaaagtttgtctactgggggtaaaaatatcagatggtgcacattaaaagggagatgagatttgtcggagacagatttcagaatccttttagatgatccaattcaagaaaaccctctataaaatttaataaactgtataagttaactataatattttatactttctttttggtgtcttaaaaatttaaagaagcgaggaacatgccatttggtgagtaccgttggaagctattttaatttctaggaaaagccccaaatatcactccaaatagattttgtttgcagatctcagttcagaatgcacacacacacacacacacacacacacacacacacagagatgtatttatctttccaaattggattctggtttcagagatagagagttggtataaataattgaaaggataaatctaaaaccccctgacagtccgccaaattcaagaacagaagtggttgccaactctctaacaacaatgtttgggaagctgattccaaagtagctgaggatgaggtcataagcatactgtgaaacccaagattcttcttccctggtagaattacaatagttactcttgataaatataagtattccatgtcttgccctctttcctcactctctgcttatccttttagacctaagtttcattggaaatagcctgaattagaagaaagcccatccgaatctttattagccccctctaatgattagtttccaggctgcgttcatacctttgacctctcagtgtcaaagtcctacctaggcctccccacaacagagagggccgtaacagcaatccctgcccctcctttacctcccagcctcttgcagaggagcccagtgataacacatgtgaagttctttgctgtcctcttgtagaaggtgctgcagtgcaaagtattaatacggtcttagacaaaataactgtcatgatttgggaccagtttggttgagcttgtcagaagacatttcatttgtttcatttctgcacttctctatgaattttgggatactatatttctgtgaaggacttattgtatagacaactcaaaaaggaaagaaactttccagtattaccacttcttcctggaatatagctgtagtatttctcactagtattattagatacctgtgtacagaaagtatgcagttattcaggttaatgtttcatattaaagaatgtatttgtaaaatgtaacatgatcagtagttaccttttttcaagctctgaagaagttcagattacgtgttagacttaagttacagtgaaaactgttttaatactacttttgtggctagcaaaggttgtgcatctatttaaaattatttacaggatgctctaaataaggggcattaaagataggtttagctcttaattttagaaattgtgacactactgatgtctgtcatacagttattcttcagaagttctctgagatgtcaaatataatttttgtttaattcagagataagtaacacctgctctattgattcactattacaacaaaccctaattttgtcattaaatattttaactctgtgatgaaa

SEQ ID NO: 7302 - protein, 210 aa, Homo sapiens; identical to SEQ ID NO: 1004

SEQ ID NO: 7303 - DNA, 3991 bp, Homo sapiens
cgcactcggcggcgggcgggcgcgcggctgcagctggagctccagcgcccggagttggagttgccgggagtttccccccaacccctcccttttcgcgcgcggcagcaggagccggcgcgggagccgcgagcggcggcgagccagcacccgggccggctaagccttgtccggagcccggagccccgcgcggggcagccccccggggaggagcctcgtgctctgggacgcgtgccgcgcactggcacggcaggggcgcgagccaggctgcacgattcactgcgtgctgtcctcacttgttctacaatgagtgccaaatctgctatcagcaaggaaatttttgcacctcttgatgaaaggatgctgggagctgtccaagtcaagaggaggacaaagaaaaagattcctttcttggcaactggaggtcaaggcgaatatttaacttatatctgcctgtcagtgacaaacaagaaacccacacaggcgtccatcacaaaggtcaaacagtttgaaggctccacatcatttgttcggagatcacagtggatgctcgagcagcttcgccaggttaatggtatcgatcctaatggggattcggcagagtttgatttgttgtttgaaaatgcttttgaccagtgggtagccagcacagcgtcagaaaaatgcaccttcttccagatcctccaccatacctgccagaggtacctcacggacaggaagccagagtttattaactgccaatccaaaattatgggaggaaacagcatcctccattcagctgctgacagcgtgaccagcgcagtgcagaaggcaagccaggccttgaatgagcgtggagagcgattaggccgagcagaggagaagacagaagacctgaagaacagcgcccagcagtttgcagaaactgcgcacaagcttgccatgaagcacaaatgttgagaaactgcctatcctggtgactcttcttaagagaaactgaagagtttgttcagcagtttttacaagaattcgggacctccgcttgcttctttttttccaatatttggacacttagagtggtttttgttttttcttttcagatgttaatgtgaaagaaagggtgttgcatttttacatttccctaatgatcttgctaataaatgctacaatagcatcagcttcattttgggtttttgcctcctcccactgtgtgtatgtgtgtatatgtatgttttgaatatgttttctttattaaaaaatattttttgtagtttgaatatgaaatttggaccaaatgataaactgcgctgagtctaaactggcaacatgtatttttttctctgatattaagcaggaaggcattttaatgtggtgacatcagatgttatttttcctagatgaaaataaaagtcaagcagtgattagtttcactcactgtcctagctacacttaatttgaagattaaaattctacattgtggaaaacaattgaatttattgggaaaaacagcagtcttagattttgctccttgcatagtaatcttttgcatgaaccatcaccagcgttcaaaaaaaaaaaaaaatcagaatcgcagatagaaatctctttcctgagttacagtttaaatactcttgctacttgtatccagggtgtttacttggaattatcatatgaagggtaaaaatttgagagtaaagccctaaagaaaagcctacctaaaaccctctgtgtactcacagatgtttctcttgtcactgtcatagtgatggtcgctggtatggaaaagtgcttatatttttatcaaaaaattgatttgtccaggtaaaggtctgtgtcaatgataatgtgaacaagtagtacatttaaaatgtttgtcttgtctttttacagtcatgcctattttagagacaccttcataatgtccttgggagagggcctttagtttcttggtatctggattttggaggttttgatgttgtttttgctatctatttatttaatgtaatttaatatgtgagtttcttgacaaattgcatttcatggcaattgcaccttgcctggtctgatataaaacaccacaatcacaaacctttacattgcagtcagtttcaatacagttggtcacacacctcgtgattttctattactcaagataataaggggcttagggtctagaagttctgtttcctagagggttaaaatgctaaacataaaaaaagctgtgctttttttgtgaaactaggagacaagctgcacatctcagacacattgtaagcctaccactgcagcgcattgatttttaagctgcctgaatcttcaggacccctatctattccatcctatccattttgctgattgagtcgatatgtattgcagcctcttacataggagcataagatgacttttggattgttaatactgatttaaatagctgaagttctcctaataaagcattcccaaggagagagaaagtttgtctactgggggtaaaaatatcagatggtgcacattaaaagggagatgagatttgtcggagacagatttcagaatccttttagatgatccaattcaagaaaaccctctataaaatttaataaactgtataagttaactataatattttatactttctttttggtgtcttaaaaatttaaagaagcgaggaacatgccatttggtgagtaccgttggaagctattttaatttctaggaaaagccccaaatatcactccaaatagattttgtttgcagatctcagttcagaatgcacacacacacacacacacacacacacacacacacagagatgtatttatctttccaaattggattctggtttcagagatagagagttggtataaataattgaaaggataaatctaaaaccccctgacagtccgccaaattcaagaacagaagtggttgccaactctctaacaacaatgtttgggaagctgattccaaagtagctgaggatgaggtcataagcatactgtgaaacccaagattcttcttccctggtagaattacaatagttactcttgataaatataagtattccatgtcttgccctctttcctcactctctgcttatccttttagacctaagtttcattggaaatagcctgaattagaagaaagcccatccgaatctttattagccccctctaatgattagtttccaggctgcgttcatacctttgacctctcagtgtcaaagtcctacctaggcctccccacaacagagagggccgtaacagcaatccctgcccctcctttacctcccagcctcttgcagaggagcccagtgataacacatgtgaagttctttgctgtcctcttgtagaaggtgctgcagtgcaaagtattaatacggtcttagacaaaataactgtcatgatttgggaccagtttggttgagcttgtcagaagacatttcatttgtttcatttctgcacttctctatgaattttgggatactatatttctgtgaaggacttattgtatagacaactcaaaaaggaaagaaactttccagtattaccacttcttcctggaatatagctgtagtatttctcactagtattattagatacctgtgtacagaaagtatgcagttattcaggttaatgtttcatattaaagaatgtatttgtaaaatgtaacatgatcagtagttaccttttttcaagctctgaagaagttcagattacgtgttagacttaagttacagtgaaaactgttttaatactacttttgtggctagcaaaggttgtgcatctatttaaaattatttacaggatgctctaaataaggggcattaaagataggtttagctcttaattttagaaattgtgacactactgatgtctgtcatacagttattcttcagaagttctctgagatgtcaaatataatttttgtttaattcagagataagtaacacctgctctattgattcactattacaacaaaccctaattttgtcattaaatattttaactctgtgatgaaa

SEQ ID NO: 7304 - protein, 210 aa, Homo sapiens; identical to SEQ ID NO: 1004

SEQ ID NO: 7305 - DNA, 4113 bp, Homo sapiens
ggcgctcgcactcggcggcgggcgggcgcgcggctgcagctggagctccagcgcccggagttggagttgccgggagtttccccccaacccctcccttttcgcgcgcggcagcaggagccggcgcgggagccgcgagcggcggcgagccagcacccgggccggctaagccttgtccggagcccggagccccgcgcggggcagccccccggggaggagcctcgtgctctgggacgcgtgccgcgcactggcacggcaggggcgcgagccaggctgcacgtttcctgtttagaaagttctgctccttcataaggaccttgaagtactaggaggaaaggtgctttgtgtgtggagttttccatgaagtgcagtcccaactaaaaggctgcgttaaagattcactgcgtgctgtcctcacttgttctacaatgagtgccaaatctgctatcagcaaggaaatttttgcacctcttgatgaaaggatgctgggagctgtccaagtcaagaggaggacaaagaaaaagattcctttcttggcaactggaggtcaaggcgaatatttaacttatatctgcctgtcagtgacaaacaagaaacccacacaggcgtccatcacaaaggtcaaacagtttgaaggctccacatcatttgttcggagatcacagtggatgctcgagcagcttcgccaggttaatggtatcgatcctaatggggattcggcagagtttgatttgttgtttgaaaatgcttttgaccagtgggtagccagcacagcgtcagaaaaatgcaccttcttccagatcctccaccatacctgccagaggtacctcacggacaggaagccagagtttattaactgccaatccaaaattatgggaggaaacagcatcctccattcagctgctgacagcgtgaccagcgcagtgcagaaggcaagccaggccttgaatgagcgtggagagcgattaggccgagcagaggagaagacagaagacctgaagaacagcgcccagcagtttgcagaaactgcgcacaagcttgccatgaagcacaaatgttgagaaactgcctatcctggtgactcttcttaagagaaactgaagagtttgttcagcagtttttacaagaattcgggacctccgcttgcttctttttttccaatatttggacacttagagtggtttttgttttttcttttcagatgttaatgtgaaagaaagggtgttgcatttttacatttccctaatgatcttgctaataaatgctacaatagcatcagcttcattttgggtttttgcctcctcccactgtgtgtatgtgtgtatatgtatgttttgaatatgttttctttattaaaaaatattttttgtagtttgaatatgaaatttggaccaaatgataaactgcgctgagtctaaactggcaacatgtatttttttctctgatattaagcaggaaggcattttaatgtggtgacatcagatgttatttttcctagatgaaaataaaagtcaagcagtgattagtttcactcactgtcctagctacacttaatttgaagattaaaattctacattgtggaaaacaattgaatttattgggaaaaacagcagtcttagattttgctccttgcatagtaatcttttgcatgaaccatcaccagcgttcaaaaaaaaaaaaaaatcagaatcgcagatagaaatctctttcctgagttacagtttaaatactcttgctacttgtatccagggtgtttacttggaattatcatatgaagggtaaaaatttgagagtaaagccctaaagaaaagcctacctaaaaccctctgtgtactcacagatgtttctcttgtcactgtcatagtgatggtcgctggtatggaaaagtgcttatatttttatcaaaaaattgatttgtccaggtaaaggtctgtgtcaatgataatgtgaacaagtagtacatttaaaatgtttgtcttgtctttttacagtcatgcctattttagagacaccttcataatgtccttgggagagggcctttagtttcttggtatctggattttggaggttttgatgttgtttttgctatctatttatttaatgtaatttaatatgtgagtttcttgacaaattgcatttcatggcaattgcaccttgcctggtctgatataaaacaccacaatcacaaacctttacattgcagtcagtttcaatacagttggtcacacacctcgtgattttctattactcaagataataaggggcttagggtctagaagttctgtttcctagagggttaaaatgctaaacataaaaaaagctgtgctttttttgtgaaactaggagacaagctgcacatctcagacacattgtaagcctaccactgcagcgcattgatttttaagctgcctgaatcttcaggacccctatctattccatcctatccattttgctgattgagtcgatatgtattgcagcctcttacataggagcataagatgacttttggattgttaatactgatttaaatagctgaagttctcctaataaagcattcccaaggagagagaaagtttgtctactgggggtaaaaatatcagatggtgcacattaaaagggagatgagatttgtcggagacagatttcagaatccttttagatgatccaattcaagaaaaccctctataaaatttaataaactgtataagttaactataatattttatactttctttttggtgtcttaaaaatttaaagaagcgaggaacatgccatttggtgagtaccgttggaagctattttaatttctaggaaaagccccaaatatcactccaaatagattttgtttgcagatctcagttcagaatgcacacacacacacacacacacacacacacacacacagagatgtatttatctttccaaattggattctggtttcagagatagagagttggtataaataattgaaaggataaatctaaaaccccctgacagtccgccaaattcaagaacagaagtggttgccaactctctaacaacaatgtttgggaagctgattccaaagtagctgaggatgaggtcataagcatactgtgaaacccaagattcttcttccctggtagaattacaatagttactcttgataaatataagtattccatgtcttgccctctttcctcactctctgcttatccttttagacctaagtttcattggaaatagcctgaattagaagaaagcccatccgaatctttattagccccctctaatgattagtttccaggctgcgttcatacctttgacctctcagtgtcaaagtcctacctaggcctccccacaacagagagggccgtaacagcaatccctgcccctcctttacctcccagcctcttgcagaggagcccagtgataacacatgtgaagttctttgctgtcctcttgtagaaggtgctgcagtgcaaagtattaatacggtcttagacaaaataactgtcatgatttgggaccagtttggttgagcttgtcagaagacatttcatttgtttcatttctgcacttctctatgaattttgggatactatatttctgtgaaggacttattgtatagacaactcaaaaaggaaagaaactttccagtattaccacttcttcctggaatatagctgtagtatttctcactagtattattagatacctgtgtacagaaagtatgcagttattcaggttaatgtttcatattaaagaatgtatttgtaaaatgtaacatgatcagtagttaccttttttcaagctctgaagaagttcagattacgtgttagacttaagttacagtgaaaactgttttaatactacttttgtggctagcaaaggttgtgcatctatttaaaattatttacaggatgctctaaataaggggcattaaagataggtttagctcttaattttagaaattgtgacactactgatgtctgtcatacagttattcttcagaagttctctgagatgtcaaatataatttttgtttaattcagagataagtaacacctgctctattgattcactattacaacaaaccctaattttgtcattaaatattttaactctgtgatgaaa

SEQ ID NO: 7306 - protein, 210 aa, Homo sapiens; identical to SEQ ID NO: 1004

SEQ ID NO: 7307 - DNA, 1707 bp, Homo sapiens
cggagttggagttgccgggagtttccccccaacccctcccttttcgcgcgcggcagcaggagccggcgcgggagccgcgagcggcggcgagccagcacccgggccggctaagccttgtccggagcccggagccccgcgcggggcagccccccggggaggagcctcgtgctctgggacgcgtgccgcgcactggcacggcaggggcgcgagccaggctgcacgtgacaaacaagaaacccacacaggcgtccatcacaaaggtcaaacagtttgaaggctccacatcatttgttcggagatcacagtggatgctcgagcagcttcgccaggttaatggtatcgatcctaatggggattcggcagagtttgatttgttgtttgaaaatgcttttgaccagtgggtagccagcacagcgtcagaaaaatgcaccttcttccagatcctccaccatacctgccagaggtacctcacggacaggaagccagagtttattaactgccaatccaaaattatgggaggaaacagcatcctccattcagctgctgacagcgtgaccagcgcagtgcagaaggcaagccaggccttgaatgagcgtggagagcgattaggccgagcagaggagaagacagaagacctgaagaacagcgcccagcagtttgcagaaactgcgcacaagcttgccatgaagcacaaatgttgagaaactgcctatcctggtgactcttcttaagagaaactgaagagtttgttcagcagtttttacaagaattcgggacctccgcttgcttctttttttccaatatttggacacttagagtggtttttgttttttcttttcagatgttaatgtgaaagaaagggtgttgcatttttacatttccctaatgatcttgctaataaatgctacaatagcatcagcttcattttgggtttttgcctcctcccactgtgtgtatgtgtgtatatgtatgttttgaatatgttttctttattaaaaaatattttttgtagtttgaatatgaaatttggaccaaatgataaactgcgctgagtctaaactggcaacatgtatttttttctctgatattaagcaggaaggcattttaatgtggtgacatcagatgttatttttcctagatgaaaataaaagtcaagcagtgattagtttcactcactgtcctagctacacttaatttgaagattaaaattctacattgtggaaaacaattgaatttattgggaaaaacagcagtcttagattttgctccttgcatagtaatcttttgcatgaaccatcaccagcgttcaaaaaaaaaaaaaaatcagaatcgcagatagaaatctctttcctgagttacagtttaaatactcttgctacttgtatccagggtgtttacttggaattatcatatgaagggtaaaaatttgagagtaaagccctaaagaaaagcctacctaaaaccctctgtgtactcacagatgtttctcttgtcactgtcatagtgatggtcgctggtatggaaaagtgcttatatttttatcaaaaaattgatttgtccaggtaaaggtctgtgtcaatgataatgtgaacaagtagtacatttaaaatgtttgtcttgtctttttacagtcatgcctattttagagacaccttcataatgtccttgggagagggcctttagtttcttggtatctggattttggag

SEQ ID NO: 7308 - protein, 130 aa, Homo sapiens
MLEQLRQVNGIDPNGDSAEFDLLFENAFDQWVASTASEKCTFFQILHHTCQRYLTDRKPEFINCQSKIMGGNSILHSAADSVTSAVQKASQALNERGERLGRAEEKTEDLKNSAQQFAETAHKLAMKHKC

SEQ ID NO: 7309 - DNA, 687 bp, Homo sapiens
acagatagaatactggcagaatggaaatgactggcatgtcagtgatgagtttatagagaagcatttaggattttcctaggtcctgcagtcagtgggtgttcttgctgcaagtgcgtcagtcaaacccaatcaaaagaaatgtcggcttgtttcctagacactagacgagcggcctttctgcagtgtgacctgccttcctcttacaggatactcaccctgccggagtctggtcactgtgggtcagctgagccagtttctgatgctcctgctctcctcctttcaggaaacagcatcctccattcagctgctgacagcgtgaccagcgcagtgcagaaggcaagccaggccttgaatgagcgtggagagcgattaggccgagcagaggagaagacagaagacctgaagaacagcgcccagcagtttgcagaaactgcgcacaagcttgccatgaagcacaaatgttgagaaactgcctatcctggtgactcttcttaagagaaactgaagagtttgttcagcagtttttacaagaattcgggacctccgcttgcttctttttttccaatatttggacacttagagtggtttttgttttttcttttcagatgttaatgtgaaagaaagggtgttgcatttttacatttccctaatgatcttgctaataaatgctacaatagcatcagcttc

SEQ ID NO: 7310 - protein, 108 aa, Homo sapiens
MSACFLDTRRAAFLQCDLPSSYRILTLPESGHCGSAEPVSDAPALLLSGNSILHSAADSVTSAVQKASQALNERGERLGRAEEKTEDLKNSAQQFAETAHKLAMKHKC

SEQ ID NO: 7311 - DNA, 923 bp, Homo sapiens
cggagttggagttgccgggagtttccccccaacccctcccttttcgcgcgcggcagcaggagccggcgcgggagccgcgagcggcggcgagccagcacccgggccggctaagccttgtccggagcccggagccccgcgcggggcagccccccggggaggagcctcgtgctctgggacgcgtgccgcgcactggcacggcaggggcgcgagccaggctgcacgtgacaaacaagaaacccacacaggcgtccatcacaaaggtcaaacagtttgaaggctccacatcatttgttcggagatcacagtggatgctcgagcagcttcgccaggttaatggtatcgatcctaatggggattcggcagagtttgatttgttgtttgaaaatgcttttgaccagtgggtagccagcacagcgtcagaaaaatgcaccttcttccagatcctccaccatacctgccagaggtacctcacggacaggaagccagagtttattaactgccaatccaaaattatgggaggaaacagcatcctccattcagctgctgacagcgtgaccagcgcagtgcagaaggcaagccaggccttgaatgagcgtggagagcgattaggccgagcagaggagaagacagaagacctgaagaacagcgcccagcagtttgcagaaactgcgcacaagcttgccatgaagcacaaatgttgagaaactgcctatcctggtgactcttcttaagagaaactgaagagtttgttcagcagtttttacaagaattcgggacctccgcttgcttctttttttccaatatttggacacttagagtggtttttgttttttcttttcagatgttaatgtgaaagaaagggtgttgcatttttacatttccctaatgatcttgctaataaatgctacaatagcatcagcttc

SEQ ID NO: 7312 - protein, 130 aa, Homo sapiens; identical to SEQ ID NO: 7308

SEQ ID NO: 7313 - DNA, 1158 bp, Homo sapiens
cgcactcggcggcgggcgggcgcgcggctgcagctggagctccagcgcccggagttggagttgccgggagtttccccccaacccctcccttttcgcgcgcggcagcaggagccggcgcgggagccgcgagcggcggcgagccagcacccgggccggctaagccttgtccggagcccggagccccgcgcggggcagccccccggggaggagcctcgtgctctgggacgcgtgccgcgcactggcacggcaggggcgcgagccaggctgcacgattcactgcgtgctgtcctcacttgttctacaatgagtgccaaatctgctatcagcaaggaaatttttgcacctcttgatgaaaggatgctgggagctgtccaagtcaagaggaggacaaagaaaaagattcctttcttggcaactggaggtcaaggcgaatatttaacttatatctgcctgtcagtgacaaacaagaaacccacacaggcgtccatcacaaaggtcaaacagtttgaaggctccacatcatttgttcggagatcacagtggatgctcgagcagcttcgccaggttaatggtatcgatcctaatggggattcggcagagtttgatttgttgtttgaaaatgcttttgaccagtgggtagccagcacagcgtcagaaaaatgcaccttcttccagatcctccaccatacctgccagaggtacctcacggacaggaagccagagtttattaactgccaatccaaaattatgggaggaaacagcatcctccattcagctgctgacagcgtgaccagcgcagtgcagaaggcaagccaggccttgaatgagcgtggagagcgattaggccgagcagaggagaagacagaagacctgaagaacagcgcccagcagtttgcagaaactgcgcacaagcttgccatgaagcacaaatgttgagaaactgcctatcctggtgactcttcttaagagaaactgaagagtttgttcagcagtttttacaagaattcgggacctccgcttgcttctttttttccaatatttggacacttagagtggtttttgttttttcttttcagatgttaatgtgaaagaaagggtgttgcatttttacatttccctaatgatcttgctaataaatgctacaatagcatcagcttc

SEQ ID NO: 7314 - protein, 210 aa, Homo sapiens; identical to SEQ ID NO: 1004

SEQ ID NO: 7315 - DNA, 3339 bp, Homo sapiens
gaatgtaagctccatgagggaaagtactttgttgctcttcttctcctcagtatcctcagcgttaggacaatgcagtgatattgaatgaattcactgcgtgctgtcctcacttgttctacaatgagtgccaaatctgctatcagcaaggaaatttttgcacctcttgatgaaaggatgctgggagctgtccaagtcaagaggaggacaaagaaaaagattcctttcttggcaactggaggtcaaggcgaatatttaacttatatctgcctgtcagatatcaagtcagcttcaaaggagaaaacatttagtgaattttagagagaagaccagctaatgaggatgaaacgtgtgttatggttgaacatcccagcgtgtctgctaagaaattcagtttaagaaaaggccattatcacattgtagtggtggactgaaaaagtgacaaacaagaaacccacacaggcgtccatcacaaaggtcaaacagtttgaaggctccacatcatttgttcggagatcacagtggatgctcgagcagcttcgccaggttaatggtatcgatcctaatggggattcggcagagtttgatttgttgtttgaaaatgcttttgaccagtgggtagccagcacagcgtcagaaaaatgcaccttcttccagatcctccaccatacctgccagaggtacctcacggacaggaagccagagtttattaactgccaatccaaaattatgggaggaaacagcatcctccattcagctgctgacagcgtgaccagcgcagtgcagaaggcaagccaggccttgaatgagcgtggagagcgattaggccgagcagaggagaagacagaagacctgaagaacagcgcccagcagtttgcagaaactgcgcacaaggtgacctttcggggaagaaaataactggctttaacagaaacaccacttctgctgaggaaacaaggatggataacctaaaaagcaatgagaagaatattcccagctgagttgcggtgacctcttctggaggctcacgctcaggtccagctggggatccagctctaagtggatgactcctgccttctcttcctgcatcccctttgcacagcgctgtcttgtcatctcattcattctctgtcgtgacagggtcttactgcactgttgcccgtggggcccatttcgagttccttcaaggagaattggctagatctatctgaaaatgcagacagccctgctggaggccagagcctcagattgctgctgttggtgcagaggcagagagtgaacttggattgaaggtctccctagttccttcctcctttctccagcctctgtgacacagagataatgatgacatggaaatgctggcattacagcctcagcttctttaacaacaacagcagcttccgtgatttcagtgggagacggatagtggaaatctggggaaacatttaagttgttgagttgggtagaggaggctaaagggaataactttataacagtcttcagttctgggaagggtgatggtacaggcatttttctttcatgtcttcccacacagaatagagcaatcaatagtgcactgataaaattctgctaaaacaagagtttaggttaatgattaaaccatgaaccaggttaccaaggaagattgtaaaattgctcttcctaaggtggcatagacaatacctggatgtcgtccacgtaggcgtccctcccagagggggctgtacaaacactggattggataacctaaccagatggcctgaattcttggccctggtagccctgtttccctgatactgtggccaagtttgcgaggcaattgggaaagcaatatggaatagtagttaacatcttgtgtttgaatatagcgctgtcatttaccatcttggtgaccttgggcaaatgcttaatttctctaagcctcagttttctcatcagtagaatagagcactattctttatgagaatagtacctacgtactagagtgttcagagaattgaatgagttcaaagctattagcacagtatgtagcacatataaatctaaattactattatttgtaatcattttcataaattttttttctactgaccctgccctattcagtcacataatgagcactgtagagggattggagaattgatactggtgattgaggatcctcaacacagggacagggaaggaatggaggagaagattttgtgcctcccaaacccaaagggaaaggggtgtgggagggccctcatgctaaatgttgatactatctaaacacagatcagcccttgaaacaggacccatcaggatagaaactaatgcggccaccaaaggcaaaggggtctctggcttgaccagtgggaaaatttatgcctagcagttacctgctttcactcgggaggggtgaggcgtggacagcttgtgtttattttggtttcccctccctcaggtcatctcggggggaagaggaggggttactagtgtctgttaatgtgtatgagagtgagagagtgtcatggccagacttgcagttgtgtgaaactgggatgtgtgcctatgaatcactggcactggcagtattcctaacaagcagattgacctctttagataaggtgtggctattttcccagggaccaggactcttgatttggacctgctagcataggctgaccatgaagctgtcattttactggacaagccacagccaggcctgctggtgaggggagagttcagagatggaacccaagcattctaccccctagacaagcatggctctgttgactcagaaggagtaagctgtgcttacaagtgggggccagaacacatggcagagtcctgagctgaaaatggcaatgccaggtggcagctcctagagctcccagttgaataagggtgccgaaccccagctggagagtttggcacacctttgtagagtccagtagaaaataacttggccttctaacttgttccaggactcctgcagtgacccaggtgcaagagtcaatggatcacttttgcacaaccctgacttcaaaatacgcaggtgcttgttgtctacagtgcagatagaaaatgatccttccgccctgccttcctagactgactcccccacctccactctggtgagcctggtttgaggaaatgtggtcctttcttgagctccgggcttcatgcaaagttaacctcaggaaagtgcaccacaatcgcagaaacagatctgctcactttcccttgccaaaaagcacaatgttgcagcagacgcaatgctttgacggccccgccatagtcagtgagtcagtagacaagagcattacccacactcagacatcctcagatgacatttcttgc

SEQ ID NO: 7316 - protein, 130 aa, Homo sapiens
MLEQLRQVNGIDPNGDSAEFDLLFENAFDQWVASTASEKCTFFQILHHTCQRYLTDRKPEFINCQSKIMGGNSILHSAADSVTSAVQKASQALNERGERLGRAEEKTEDLKNSAQQFAETAHKVTFRGRK

SEQ ID NO: 7317 - DNA, 4060 bp, Homo sapiens
acgccccccacccgggaggggggagagaggcaaaaagtaagagaggaaaaaaaatagcaggaagatggcgcccaccaagcccagctttcagcaggatccttccaggcgagaacgtttacaagcattgagaaaggagaaatcccgagatgctgctcgctcccgccggggaaaagaaaactttgagttctatgaattggccaagttgttgcctcttcctgcagccattaccagccagctcgacaaggcatccatcattcgacttacaattagctatctgaaaatgagggactttgctaaccagggggaccctccgtggaacttgcgaatggaaggccctccacctaacacatcagtaaaagttataggtgcacagcgaaggagaagccccagtgcactagccattgaagtatttgaagcacatttgggaagccacattttgcagtccctggatggctttgtatttgcactaaatcaggaaggaaaatttttgtacatttccgaaacagtctccatctacctaggcctctcacaagtggagctgacaggcagcagtgtctttgactatgtccaccccggagatcacgtggagatggctgagcagctgggcatgaagctcccccctgggcggggtctcctgtcacagggcactgctgaggacggagccagctcagcatcttcctcctctcagtcggagacccccgagccagtggagtcaaccagccccagtctgctaaccactgacaacactcttgagcgttcctttttcatccgaatgaaatctactctgaccaaacgcggtgtgcacatcaaatcatcaggatataaggtgattcacataacaggccggctacgcctgagagtgtcgctgtcccacgggaggaccgtccccagccaaatcatgggtctcgtggttgttgcgcatgccttgcctccccctacgatcaatgaagtcagaattgactgccatatgttcgtcactcgagtaaatatggacctcaatatcatttactgtgaaaataggattagtgattatatggatctgacccctgtagatatcgtagggaagagatgctaccacttcatccatgctgaagacgtggagggcatcaggcacagtcacttggacttgctgaataagggtcagtgtgtgacaaagtactatcgctggatgcagaagaacggaggatatatttggatacagtccagtgccaccatagctattaatgccaagaatgcaaatgaaaagaatatcatctgggtgaattaccttcttagcaatcctgagtacaaggacacacccatggacatcgcacagctcccccatctgccggagaaaacttccgaatcctcggagacatccgactctgagtcagactctaaagacacctcaggtattacagaggacaacgagaactccaagtccgacgagaaggggaaccagtccgagaacagcgaagacccggagcccgaccggaagaagtcgggcaacgcgtgtgacaacgacatgaactgcaacgacgacggccacagctccagtaacccggacagccgcgacagcgacgacagcttcgagcactcggactttgagaaccccaaggcgggcgaggacggcttcggtgctctgggcgcgatgcagatcaaggtggagcgctacgtggagagcgagtcggacctgcggctgcagaactgcgagtcactcacgtccgacagcgccaaggactcggacagcgcaggcgaggcgggcgcgcaggcctccagcaagcaccagaagcgcaagaaaaggcggaaacggcaaaagggcggcagcgccagccgccggcgcctgtccagcgcgtcgagcccaggcggcctggacgcgggcctggtggagcccccgcggctgctgtcctcccccaacagtgcctcggtgctcaagatcaagacggagatctcagaacccatcaatttcgacaatgacagcagcatctggaactacccgcccaaccgggagatctccaggaacgagtccccctacagcatgaccaagccccccagctctgagcacttcccgtccccgcagggcggcggcggtgggggtggcggtggcggggggctgcacgtggccattcccgactcggtcctcaccccgcccggcgccgacggcgcggccgcccgcaagactcagttcggcgcctcggccaccgcggccctggcccccgtcgcctccgacccgctgtcacccccgctctcggcgtccccgcgggacaagcaccccgggaacggcggcgggggcgggggcgggggcggcggcgcggggggcggcggccccagcgcgtccaactccttgctgtacactggggacctggaggcgctgcagaggttgcaggcgggcaacgtcgtgctcccgctggtgcacagggtgaccgggaccctggccgccaccagcacggccgcgcagagggtctacaccacgggcaccatccgctacgcgcccgccgaggtgaccctggccatgcagagcaacctgctgcccaacgcgcacgctgttaacttcgtggacgttaacagccccggctttggcctcgaccccaagacgcccatggagatgctctaccaccacgtgcaccggctcaacatgtcaggaccgttcggcggcgcagtgagcgcagctagcctgacgcagatgcccgccggcaacgtgttcaccacggccgagggactcttctccacgctgcccttccccgtctacagcaacggcatccacgcggcacagactctggagcgcaaggaggactgaggcgccgcccgtcctgggcccggccaggccccgcttggaggaggcatcgtcggcattttcgtttagacctttaattctagcactttgaattcgagcaggtcagcgtcttctctcgccacgacggtccccattccaccccctctttctttcacctgacttattctttcgtgtaaagatatgtttattttttgccttcagagggtcagacgaccagttgcctgccgttttgtcttcttctaaggtgtgtgttgggttgttttgctttcctttgcatctttattaagatgtctttcatgtgtatatgcctctgccatagaatactcagtcttgtggtcaagagagttctcaagtgacaaccattggggtttcttcataaagatcttgatatgatcaagatggaaagagacaagcataaacaatgtgccctgtttgactaagtcaaatgaaatagggtggtttttgtttctgttcctaattcctttaaaaaatagggggaatagtattttagaattttatgcagaatttaattctctttttacggttaagattttaagattttcttacttgcacataaaaataatttgggttcttaaacttaatttctggcctgtgactagaatgtttaaaaaaaaaaaagtcggactaaatgttaattactgaaacattaacttaatttctaaaaccatggtgctatcatttattaatctgtaatgtcttcatacaaaatgcagctcctgggctgggttttgggggaaaaaaaaaaaatgtgttctgtcctggtctggagtccgttgctgcagtctccttggttagttaagacaaagccctcattaacgtttgctgcaggacttaaaattttttacctcccaactaacaaacatagcctcacattaaatttaatgggtcagtaaagccccttttaaaggggctgctggaaaactcaatcaaactgatttgaggagcagtttaggtacatactgccttttgtttagctttttgttttccttactcagtctaactgaggctaattttgcaacttcaataacacttcggagtaaaagaaggaaaatatttaacatgtttttggtttttttcatttcttgcttaaaacaaaaaggaaggttgtatttggggggactggtttgatttgatggaatttctttccctttggttcttatttctgggttgaaaccaataagttttaaaactaaagaatgggttaataagcttcagacagataactgcaactgaaaactgcacattaagtaaaaaaaaaaaaaaaga

SEQ ID NO: 7318 - protein, 903 aa, Homo sapiens
MAPTKPSFQQDPSRRERLQALRKEKSRDAARSRRGKENFEFYELAKLLPLPAAITSQLDKASIIRLTISYLKMRDFANQGDPPWNLRMEGPPPNTSVKVIGAQRRRSPSALAIEVFEAHLGSHILQSLDGFVFALNQEGKFLYISETVSIYLGLSQVELTGSSVFDYVHPGDHVEMAEQLGMKLPPGRGLLSQGTAEDGASSASSSSQSETPEPVESTSPSLLTTDNTLERSFFIRMKSTLTKRGVHIKSSGYKVIHITGRLRLRVSLSHGRTVPSQIMGLVVVAHALPPPTINEVRIDCHMFVTRVNMDLNIIYCENRISDYMDLTPVDIVGKRCYHFIHAEDVEGIRHSHLDLLNKGQCVTKYYRWMQKNGGYIWIQSSATIAINAKNANEKNIIWVNYLLSNPEYKDTPMDIAQLPHLPEKTSESSETSDSESDSKDTSGITEDNENSKSDEKGNQSENSEDPEPDRKKSGNACDNDMNCNDDGHSSSNPDSRDSDDSFEHSDFENPKAGEDGFGALGAMQIKVERYVESESDLRLQNCESLTSDSAKDSDSAGEAGAQASSKHQKRKKRRKRQKGGSASRRRLSSASSPGGLDAGLVEPPRLLSSPNSASVLKIKTEISEPINFDNDSSIWNYPPNREISRNESPYSMTKPPSSEHFPSPQGGGGGGGGGGGLHVAIPDSVLTPPGADGAAARKTQFGASATAALAPVASDPLSPPLSASPRDKHPGNGGGGGGGGGGAGGGGPSASNSLLYTGDLEALQRLQAGNVVLPLVHRVTGTLAATSTAAQRVYTTGTIRYAPAEVTLAMQSNLLPNAHAVNFVDVNSPGFGLDPKTPMEMLYHHVHRLNMSGPFGGAVSAASLTQMPAGNVFTTAEGLFSTLPFPVYSNGIHAAQTLERKED

SEQ ID NO: 7319 - DNA, 4086 bp, Homo sapiens
atggcgcccaccaagcccagctttcagcaggatccttccaggcgagaacgaataactgcccagcatcctctgcccaaccaatcagaatgtaggaaaatctacagatatgacggaatctactgtgaatctacctaccagaatttacaagcattgagaaaggagaaatcccgagatgctgctcgctcccgccggggaaaagaaaactttgagttctatgaattggccaagttgttgcctcttcctgcagccattaccagccagctcgacaaggcatccatcattcgacttacaattagctatctgaaaatgagggactttgctaaccagggggaccctccgtggaacttgcgaatggaaggccctccacctaacacatcagtaaaagttataggtgcacagcgaaggagaagccccagtgcactagccattgaagtatttgaagcacatttgggaagccacattttgcagtccctggatggctttgtatttgcactaaatcaggaaggaaaatttttgtacatttccgaaacagtctccatctacctaggcctctcacaagtggagctgacaggcagcagtgtctttgactatgtccaccccggagatcacgtggagatggctgagcagctgggcatgaagctcccccctgggcggggtctcctgtcacagggcactgctgaggacggagccagctcagcatcttcctcctctcagtcggagacccccgagccagtggagtcaaccagccccagtctgctaaccactgacaacactcttgagcgttcctttttcatccgaatgaaatctactctgaccaaacgcggtgtgcacatcaaatcatcaggatataaggtgattcacataacaggccggctacgcctgagagtgtcgctgtcccacgggaggaccgtccccagccaaatcatgggtctcgtggttgttgcgcatgccttgcctccccctacgatcaatgaagtcagaattgactgccatatgttcgtcactcgagtaaatatggacctcaatatcatttactgtgaaaataggattagtgattatatggatctgacccctgtagatatcgtagggaagagatgctaccacttcatccatgctgaagacgtggagggcatcaggcacagtcacttggacttgctgaataagggtcagtgtgtgacaaagtactatcgctggatgcagaagaacggaggatatatttggatacagtccagtgccaccatagctattaatgccaagaatgcaaatgaaaagaatatcatctgggtgaattaccttcttagcaatcctgagtacaaggacacacccatggacatcgcacagctcccccatctgccggagaaaacttccgaatcctcggagacatccgactctgagtcagactctaaagacacctcaggtattacagaggacaacgagaactccaagtccgacgagaaggggaaccagtccgagaacagcgaagacccggagcccgaccggaagaagtcgggcaacgcgtgtgacaacgacatgaactgcaacgacgacggccacagctccagtaacccggacagccgcgacagcgacgacagcttcgagcactcggactttgagaaccccaaggcgggcgaggacggcttcggtgctctgggcgcgatgcagatcaaggtggagcgctacgtggagagcgagtcggacctgcggctgcagaactgcgagtcactcacgtccgacagcgccaaggactcggacagcgcaggcgaggcgggcgcgcaggcctccagcaagcaccagaagcgcaagaaaaggcggaaacggcaaaagggcggcagcgccagccgccggcgcctgtccagcgcgtcgagcccaggcggcctggacgcgggcctggtggagcccccgcggctgctgtcctcccccaacagtgcctcggtgctcaagatcaagacggagatctcagaacccatcaatttcgacaatgacagcagcatctggaactacccgcccaaccgggagatctccaggaacgagtccccctacagcatgaccaagccccccagctctgagcacttcccgtccccgcagggcggcggcggtgggggtggcggtggcggggggctgcacgtggccattcccgactcggtcctcaccccgcccggcgccgacggcgcggccgcccgcaagactcagttcggcgcctcggccaccgcggccctggcccccgtcgcctccgacccgctgtcacccccgctctcggcgtccccgcgggacaagcaccccgggaacggcggcgggggcgggggcgggggcggcggcgcggggggcggcggccccagcgcgtccaactccttgctgtacactggggacctggaggcgctgcagaggttgcaggcgggcaacgtcgtgctcccgctggtgcacagggtgaccgggaccctggccgccaccagcacggccgcgcagagggtctacaccacgggcaccatccgctacgcgcccgccgaggtgaccctggccatgcagagcaacctgctgcccaacgcgcacgctgttaacttcgtggacgttaacagccccggctttggcctcgaccccaagacgcccatggagatgctctaccaccacgtgcaccggctcaacatgtcaggaccgttcggcggcgcagtgagcgcagctagcctgacgcagatgcccgccggcaacgtgttcaccacggccgagggactcttctccacgctgcccttccccgtctacagcaacggcatccacgcggcacagactctggagcgcaaggaggactgaggcgccgcccgtcctgggcccggccaggccccgcttggaggaggcatcgtcggcattttcgtttagacctttaattctagcactttgaattcgagcaggtcagcgtcttctctcgccacgacggtccccattccaccccctctttctttcacctgacttattctttcgtgtaaagatatgtttattttttgccttcagagggtcagacgaccagttgcctgccgttttgtcttcttctaaggtgtgtgttgggttgttttgctttcctttgcatctttattaagatgtctttcatgtgtatatgcctctgccatagaatactcagtcttgtggtcaagagagttctcaagtgacaaccattggggtttcttcataaagatcttgatatgatcaagatggaaagagacaagcataaacaatgtgccctgtttgactaagtcaaatgaaatagggtggtttttgtttctgttcctaattcctttaaaaaatagggggaatagtattttagaattttatgcagaatttaattctctttttacggttaagattttaagattttcttacttgcacataaaaataatttgggttcttaaacttaatttctggcctgtgactagaatgtttaaaaaaaaaaaagtcggactaaatgttaattactgaaacattaacttaatttctaaaaccatggtgctatcatttattaatctgtaatgtcttcatacaaaatgcagctcctgggctgggttttgggggaaaaaaaaaaaatgtgttctgtcctggtctggagtccgttgctgcagtctccttggttagttaagacaaagccctcattaacgtttgctgcaggacttaaaattttttacctcccaactaacaaacatagcctcacattaaatttaatgggtcagtaaagccccttttaaaggggctgctggaaaactcaatcaaactgatttgaggagcagtttaggtacatactgccttttgtttagctttttgttttccttactcagtctaactgaggctaattttgcaacttcaataacacttcggagtaaaagaaggaaaatatttaacatgtttttggtttttttcatttcttgcttaaaacaaaaaggaaggttgtatttggggggactggtttgatttgatggaatttctttccctttggttcttatttctgggttgaaaccaataagttttaaaactaaagaatgggttaataagcttcagacagataactgcaactgaaaactgcacattaagtaaaaaaaaaaaaaaaga

SEQ ID NO: 7320 - protein, 933 aa, Homo sapiens
MAPTKPSFQQDPSRRERITAQHPLPNQSECRKIYRYDGIYCESTYQNLQALRKEKSRDAARSRRGKENFEFYELAKLLPLPAAITSQLDKASIIRLTISYLKMRDFANQGDPPWNLRMEGPPPNTSVKVIGAQRRRSPSALAIEVFEAHLGSHILQSLDGFVFALNQEGKFLYISETVSIYLGLSQVELTGSSVFDYVHPGDHVEMAEQLGMKLPPGRGLLSQGTAEDGASSASSSSQSETPEPVESTSPSLLTTDNTLERSFFIRMKSTLTKRGVHIKSSGYKVIHITGRLRLRVSLSHGRTVPSQIMGLVVVAHALPPPTINEVRIDCHMFVTRVNMDLNIIYCENRISDYMDLTPVDIVGKRCYHFIHAEDVEGIRHSHLDLLNKGQCVTKYYRWMQKNGGYIWIQSSATIAINAKNANEKNIIWVNYLLSNPEYKDTPMDIAQLPHLPEKTSESSETSDSESDSKDTSGITEDNENSKSDEKGNQSENSEDPEPDRKKSGNACDNDMNCNDDGHSSSNPDSRDSDDSFEHSDFENPKAGEDGFGALGAMQIKVERYVESESDLRLQNCESLTSDSAKDSDSAGEAGAQASSKHQKRKKRRKRQKGGSASRRRLSSASSPGGLDAGLVEPPRLLSSPNSASVLKIKTEISEPINFDNDSSIWNYPPNREISRNESPYSMTKPPSSEHFPSPQGGGGGGGGGGGLHVAIPDSVLTPPGADGAAARKTQFGASATAALAPVASDPLSPPLSASPRDKHPGNGGGGGGGGGGAGGGGPSASNSLLYTGDLEALQRLQAGNVVLPLVHRVTGTLAATSTAAQRVYTTGTIRYAPAEVTLAMQSNLLPNAHAVNFVDVNSPGFGLDPKTPMEMLYHHVHRLNMSGPFGGAVSAASLTQMPAGNVFTTAEGLFSTLPFPVYSNGIHAAQTLERKED

SEQ ID NO: 7321 - DNA, 4047 bp, Homo sapiens
atggcgcccaccaagcccagctttcagcaggatccttccaggcgagaacgtttacaagcattgagaaaggagaaatcccgagatgctgctcgctcccgccggggaaaagaaaactttgagttctatgaattggccaagttgttgcctcttcctgcagccattaccagccagctcgacaaggcatccatcattcgacttacaattagctatctgaaaatgagggactttgctaaccagggggaccctccgtggaacttgcgaatggaaggccctccacctaacacatcagtaaaagggatacaaatgtggaaatctgaactctgcatgagaaagacaccatgtgaagttataggtgcacagcgaaggagaagccccagtgcactagccattgaagtatttgaagcacatttgggaagccacattttgcagtccctggatggctttgtatttgcactaaatcaggaaggaaaatttttgtacatttccgaaacagtctccatctacctaggcctctcacaagtggagctgacaggcagcagtgtctttgactatgtccaccccggagatcacgtggagatggctgagcagctgggcatgaagctcccccctgggcggggtctcctgtcacagggcactgctgaggacggagccagctcagcatcttcctcctctcagtcggagacccccgagccagtggagtcaaccagccccagtctgctaaccactgacaacactcttgagcgttcctttttcatccgaatgaaatctactctgaccaaacgcggtgtgcacatcaaatcatcaggatataaggtgattcacataacaggccggctacgcctgagagtgtcgctgtcccacgggaggaccgtccccagccaaatcatgggtctcgtggttgttgcgcatgccttgcctccccctacgatcaatgaagtcagaattgactgccatatgttcgtcactcgagtaaatatggacctcaatatcatttactgtgaaaataggattagtgattatatggatctgacccctgtagatatcgtagggaagagatgctaccacttcatccatgctgaagacgtggagggcatcaggcacagtcacttggacttgctgaataagggtcagtgtgtgacaaagtactatcgctggatgcagaagaacggaggatatatttggatacagtccagtgccaccatagctattaatgccaagaatgcaaatgaaaagaatatcatctgggtgaattaccttcttagcaatcctgagtacaaggacacacccatggacatcgcacagctcccccatctgccggagaaaacttccgaatcctcggagacatccgactctgagtcagactctaaagacacctcaggtattacagaggacaacgagaactccaagtccgacgagaaggggaaccagtccgagaacagcgaagacccggagcccgaccggaagaagtcgggcaacgcgtgtgacaacgacatgaactgcaacgacgacggccacagctccagtaacccggacagccgcgacagcgacgacagcttcgagcactcggactttgagaaccccaaggcgggcgaggacggcttcggtgctctgggcgcgatgcagatcaaggtggagcgctacgtggagagcgagtcggacctgcggctgcagaactgcgagtcactcacgtccgacagcgccaaggactcggacagcgcaggcgaggcgggcgcgcaggcctccagcaagcaccagaagcgcaagaaaaggcggaaacggcaaaagggcggcagcgccagccgccggcgcctgtccagcgcgtcgagcccaggcggcctggacgcgggcctggtggagcccccgcggctgctgtcctcccccaacagtgcctcggtgctcaagatcaagacggagatctcagaacccatcaatttcgacaatgacagcagcatctggaactacccgcccaaccgggagatctccaggaacgagtccccctacagcatgaccaagccccccagctctgagcacttcccgtccccgcagggcggcggcggtgggggtggcggtggcggggggctgcacgtggccattcccgactcggtcctcaccccgcccggcgccgacggcgcggccgcccgcaagactcagttcggcgcctcggccaccgcggccctggcccccgtcgcctccgacccgctgtcacccccgctctcggcgtccccgcgggacaagcaccccgggaacggcggcgggggcgggggcgggggcggcggcgcggggggcggcggccccagcgcgtccaactccttgctgtacactggggacctggaggcgctgcagaggttgcaggcgggcaacgtcgtgctcccgctggtgcacagggtgaccgggaccctggccgccaccagcacggccgcgcagagggtctacaccacgggcaccatccgctacgcgcccgccgaggtgaccctggccatgcagagcaacctgctgcccaacgcgcacgctgttaacttcgtggacgttaacagccccggctttggcctcgaccccaagacgcccatggagatgctctaccaccacgtgcaccggctcaacatgtcaggaccgttcggcggcgcagtgagcgcagctagcctgacgcagatgcccgccggcaacgtgttcaccacggccgagggactcttctccacgctgcccttccccgtctacagcaacggcatccacgcggcacagactctggagcgcaaggaggactgaggcgccgcccgtcctgggcccggccaggccccgcttggaggaggcatcgtcggcattttcgtttagacctttaattctagcactttgaattcgagcaggtcagcgtcttctctcgccacgacggtccccattccaccccctctttctttcacctgacttattctttcgtgtaaagatatgtttattttttgccttcagagggtcagacgaccagttgcctgccgttttgtcttcttctaaggtgtgtgttgggttgttttgctttcctttgcatctttattaagatgtctttcatgtgtatatgcctctgccatagaatactcagtcttgtggtcaagagagttctcaagtgacaaccattggggtttcttcataaagatcttgatatgatcaagatggaaagagacaagcataaacaatgtgccctgtttgactaagtcaaatgaaatagggtggtttttgtttctgttcctaattcctttaaaaaatagggggaatagtattttagaattttatgcagaatttaattctctttttacggttaagattttaagattttcttacttgcacataaaaataatttgggttcttaaacttaatttctggcctgtgactagaatgtttaaaaaaaaaaaagtcggactaaatgttaattactgaaacattaacttaatttctaaaaccatggtgctatcatttattaatctgtaatgtcttcatacaaaatgcagctcctgggctgggttttgggggaaaaaaaaaaaatgtgttctgtcctggtctggagtccgttgctgcagtctccttggttagttaagacaaagccctcattaacgtttgctgcaggacttaaaattttttacctcccaactaacaaacatagcctcacattaaatttaatgggtcagtaaagccccttttaaaggggctgctggaaaactcaatcaaactgatttgaggagcagtttaggtacatactgccttttgtttagctttttgttttccttactcagtctaactgaggctaattttgcaacttcaataacacttcggagtaaaagaaggaaaatatttaacatgtttttggtttttttcatttcttgcttaaaacaaaaaggaaggttgtatttggggggactggtttgatttgatggaatttctttccctttggttcttatttctgggttgaaaccaataagttttaaaactaaagaatgggttaataagcttcagacagataactgcaactgaaaactgcacattaagtaaaaaaaaaaaaaaaga

SEQ ID NO: 7322 - protein, 920 aa, Homo sapiens; identical to SEQ ID NO: 1008

SEQ ID NO: 7323 - DNA, 2536 bp, Homo sapiens
gattttgtcacctgagactgctgttactctgaaaatgatagcattaacttgtctaattctgagaaagacatttgttagctaatgtagactattaatagagcaaacataaaactggttgggtattagcctagcaagtatctgaccagagcattatggcattacttagattacatagatattcagtaagatatttcaggtgtgatttctgcagtgaatacagtgtttacaccagaaaacaatgtcaggaatcctataatgtaatagggaatattattcaccatagtatattaaaagagaacggagccttgctgctgaaccaattttgatctcttcctttggtcttccttccttccttgtttctctctttcttattatttcataatgaaaaaaaagaatgctagactcaaatatttacagtgctttcagaattcaataaaatgcatacataaaaatgattttaatagtaccttgatactgaaaatattatctagctacttatcattgtggtctgatttttaaatttatttctcatcagacacaatacagagcaattcagagcaggtagaattctcctgtcagatgctcacacacaacttcagttgtgccagattctgccctcagcaatgtgagcaaacttcaaacagaaatgcacatgaatagttgaaggaaaatgctggatcccacctgttgcctcttctgggaagtaatatgtctataatgtttataaattttaataacccatacagcgctttatctttcaatattaaatttatattttcctaaagtttgacttctttgggcaatatattttattctctagtatcttagaaaatcaatctactaatgtatgtccattaataaataagtatgctcttatcaagcagttatcagcacatttataaaattacattgaaatcttcattttaaatatgatgttttcttcatctaactgaacgtgctgtgatctttattgagggctggaaacatatttgttgattctgacaaggtgaattgtattcgtgtttaccttctgctccccaagattataattgaaatgaatttttcaaaatagttccttttgatgaagatcccatactgatgaaagttaaatgaacagaagtattagtttgaaatagatacacgaatgtaagcccaacttataaattgattctagttgataatatcaagctacgcctgtaaaccttctgttaggtcttagaaacaataaatacacctcaatgcatggacaattgaaggaaaaaaaccttaacaagtaaaacacaatttttactcattggacttgagtttacaaaatgtaaggccagagttagagtttatggctttagtggacattttctggaactcattttactgtcactctctagttttgaaatagtttttggtagaattttggtgggaaaaaaggaaatacaaagaaagcagtatttgaatgatgacagagtcacatattctaaaccacacattctcactcctttgatttcagtttacaagcattgagaaaggagaaatcccgagatgctgctcgctcccgccggggaaaagaaaactttgagttctatgaattggccaagttgttgcctcttcctgcagccattaccagccagctcgacaaggcatccatcattcgacttacaattagctatctgaaaatgagggactttgctaaccagggggaccctccgtggaacttgcgaatggaaggccctccacctaacacatcagtaaaagttataggtgcacagcgaaggagaagccccagtgcactagccattgaagtatttgaagcacatttgggaagccacattttgcagtccctggatggctttgtatttgcactaaatcaggaaggaaaatttttgtacatttccgaaacagtctccatctacctaggcctctcacaagtggagctgacaggcagcagtgtctttgactatgtccaccccggagatcacgtggagatggctgagcagctgggcatgaagctcccccctgggcggggtctcctgtcacagggcactgctgaggacggagccagctcagcatcttcctcctctcagtcggagacccccgagccagtggtttgcttcccaccagcgagtgatcagtttcttctgtaggacccctgtcaggaagaacatgcctggatcctacttcagagagaactcagccagggcaaggggctcttgtggctttttgggtgggtgtgagttcatagaggggaaaatcaatactgtaccaggatttagacaatttagcaaaatgcatgaggcagtactttggatgatgaataactacagctgcatggctaacccattggttgtgtaaagtatgggttatcatgttttgtctaaattttcaggcaaaatctagcctgttttgtggcattaggatcatcattatagtagtatgatttttatgctattatacttacgctatgtcccgaatgtttttaaggccagcaaaatggaaacagtagagtacttgcctgaatgcaaataaacttcagtttcaactt

SEQ ID NO: 7324 - protein, 155 aa, Homo sapiens
MRDFANQGDPPWNLRMEGPPPNTSVKVIGAQRRRSPSALAIEVFEAHLGSHILQSLDGFVFALNQEGKFLYISETVSIYLGLSQVELTGSSVFDYVHPGDHVEMAEQLGMKLPPGRGLLSQGTAEDGASSASSSSQSETPEPVVCFPPASDQFLL

SEQ ID NO: 7325 - DNA, 323 bp, Homo sapiens
tctccatctacctaggcctctcacaagctggagtgcaatgacgcgatctcagctcaccacaacctccacctcctgggttcaagtgattctcctgcctcagcctcctgagtagctggaattacaggataaatttccagaaatgaagtcaaaaggacaacatattttaagggattgtcatacatttggacaaattgttctccagaaagatgggttccagtcgcacctacagtgtatctggtactgtacaacagagaactgcaacctcagagtgagaagacagagaaatcacctaccatgcctcacagtgggaaaataaattgggg

SEQ ID NO: 7326 - protein, 58 aa, Homo sapiens
MKSKGQHILRDCHTFGQIVLQKDGFQSHLQCIWYCTTENCNLRVRRQRNHLPCLTVGK

SEQ ID NO: 7327 - DNA, 842 bp, Homo sapiens
cagtgaataaaagatggatagcttctaactctagaatgaagagttcaggcttaagagtgagagctatcactggaaaatgtccttctcaattcagaactacagcacaattcatgttgcagaccaatgtagtgggacccagtttccacctatgttcacgagtgagatgtatgcaagaaacgttttacatggaaaaagcatgcatgtctcctaacgttcagttcataactgctgcattgtgccatcttcatacactggactctttccttcctacatcgttaatgtgtttgagcacagacactgtgttcacctctccagtcacatcgacgtccaagcagatgttctgtggcaaagttacaaagcatttatgtcactttttaaaattaatcaaattctcccttggaaggagtttagttcctctggctttaaaagatattattgctgaaaaataaactctgtatacttgcttttaaagatctttgtatgccttttgtaggttcagagtgaggggtgctggaggacttttaaagtgtggtattttaaagatgttcttaattgtaaagagcaaactttacatttgtgaaaaagcatctcaaagttagaacatatatctcctaagactagctgacctccctcccgtaaactggtgatttggagacttcaaaattctgtttatcccatagaaacatgtgtatcctaggatgggaaatctgaggcttctttctctcataatttttaataaagtggaatcactagagaaagtaccggggtttcttaactttttaaattgtttttcgttttcactttaattgcataaaaggggtagaaaaattccatcaaccaaa

SEQ ID NO: 7328 - protein, 137 aa, Homo sapiens
MKSSGLRVRAITGKCPSQFRTTAQFMLQTNVVGPSFHLCSRVRCMQETFYMEKACMSPNVQFITAALCHLHTLDSFLPTSLMCLSTDTVFTSPVTSTSKQMFCGKVTKHLCHFLKLIKFSLGRSLVPLALKDIIAEK

SEQ ID NO: 7329 - DNA, 1674 bp, Homo sapiens
cgccccgctcctccgccggatcgtctgtgggtgagtctcgagccaggaggctctgagccagtggcgattggctgacgcggtggctgcgcactcggcctgagaaactcggcaagcgcgcagtgtcgactccccggtctatgccaggcgcatctcagctctggttgaagaagtgtattttgcgcagaaggaacgtgatgaagctgttatgtctagactgcaattagccattgaggagagagatgaagcaattgcacgagccaagcatatggaaatgtctctaaaagtgctagaaaatattaaccctgaagaaaatgacatgacattacaggaattactgaacagaataaacaatgcagacacagggatagctattcagaagaatggagctataattgtggatagaatctacaagaccaaggaatgtaaaatgagaataactgcagaagaaatgagtgcactaatagaagaacgggatgctgccttgtctaagtgcaaacggttagagcaggagcttcatcatgtgaaagagcagaaccagacttcagcaaacaacatgagacatctgactgctgaaaacaatcaagaacgtgctctgaaggcaaagttgttatctatgcaacaagccagagaaactgcagttcaacagtacaaaaaactggaagaggaaatccagacccttcgagtttactacagtttacacaaatctttatctcaagaagaaaatctgaaggatcagtttaactatacccttagtacatatgaagaagctttaaaaaacagagagaacattgtttccatcactcaacaacaaaatgaggaactggctactcaactgcaacaagctctgacagagcgagcaaatatggaattacaacttcaacatgccagagaggcctcccaagtggccaatgaaaaagttcaaaagttggaaaggctggtggatgtactgaggaagaaggttggaaccgggaccatgaggacagtgatctgattgaaaaaaaacgacagtctggggaagcgatcacatctggtgaccaggctgcttcattcaacactgtgtaaacaccaaagccttaacttagcaaacagttgttagaagtgggacactccaaccacattccaagctgagataaaatcaaatcacaaatgtttaaccactttgctgctgacttgagttatttatccaaatatattaactatagacttttaccaatgggtagctataaggttacagcttattttgtaactattttatatctcaatatctttaatataaatctttttactgagagatcattatagaaacatgttaaagttggttaggatcatatcttcacatatggccctttctgaatcaaagtgcggcaaagtaaatattgtctaagctttaatccactgtgttaggtcaaaacttcaaatacatgcatttttcaatatagggtatatttcttaactgatgagagaggcttagacatgagtgtgtagtcttccttcaatgcgtgtatgtaatctttgttagtataaaagatattaaatataggtgccaagaattaaatgtataatttgtttaataagagatggatatattaaaattacattcatcaaggcatgatttttgtttcactacaaataatgcaaactgttttcaataaaaagaggagactgttaatgtgt

SEQ ID NO: 7330 - protein, 261 aa, Homo sapiens
MSRLQLAIEERDEAIARAKHMEMSLKVLENINPEENDMTLQELLNRINNADTGIAIQKNGAIIVDRIYKTKECKMRITAEEMSALIEERDAALSKCKRLEQELHHVKEQNQTSANNMRHLTAENNQERALKAKLLSMQQARETAVQQYKKLEEEIQTLRVYYSLHKSLSQEENLKDQFNYTLSTYEEALKNRENIVSITQQQNEELATQLQQALTERANMELQLQHAREASQVANEKVQKLERLVDVLRKKVGTGTMRTVI

SEQ ID NO: 7331 - DNA, 6081 bp, Homo sapiens
gccccgctcctccgccggatcgtctgtgggtgagtctcgagccaggaggctctgagccagtggcgattggctgacgcggtggctgcgcactcggcctgagaaactcggcaagcgcgcagtgtcgactccccggtctatgccaggcgcatctcagagtttggcttagagattaaagctccttctatcttgtgatgccaccatcgcaaggttctcaaggttgttgtgggagaagagaaggctaaaggagctcatagaatgcctttaatgctaatccaaaagtaaatgagaaacttagaaaaagattgccaattccaaatcaacatatttagagaaaattggaaaaggagaagcttactacagctttatttgaggactttttaaagaacgctgggttctatctgtgagctgcaaatcttggagcaaaaaccagagacattgccagagcaaacaagaacagaaatacaaatggagaactggtcaaaagacataacccacagttatcttgaacaagaaactacggggataaataaaagtacgcagccagatgagcaactgactatgaattctgagaaaagtatgcatcggaaatccactgaattagttaatgaaataacatgtgagaacacagaatggccagggcagagatcaacgaattttcagatcatcagttcttatccagatgatgagtctgtttactgcactactgaaaaatacaacgttatggaacatagacataatgatatgcattatgaatgtatgactccttgtcaagttacttcagactcagataaagagaagacaatagcatttcttctaaaagaattggatattctcagaacaagcaataaaaagcttcagcagaaattggctaaagaagataaagaacagagaaaactaaagtttaagctggaactccaagagaaagaaacagaagctaaaattgctgaaaagacagcagctctggttgaagaagtgtattttgcgcagaaggaacgtgatgaagctgttatgtctagactgcaattagccattgaggagagagatgaagcaattgcacgagccaagcatatggaaatgtctctaaaagtgctagaaaatattaaccctgaagaaaatgacatgacattacaggaattactgaacagaataaacaatgcagacacagggatagctattcagaagaatggagctataattgtggatagaatctacaagaccaaggaatgtaaaatgagaataactgcagaagaaatgagtgcactaatagaagaacgggatgctgccttgtctaagtgcaaacggttagagcaggagcttcatcatgtgaaagagcagaaccagacttcagcaaacaacatgagacatctgactgctgaaaacaatcaagaacgtgctctgaaggcaaagttgttatctatgcaacaagccagagaaactgcagttcaacagtacaaaaaactggaagaggaaatccagacccttcgagtttactacagtttacacaaatctttatctcaagaagaaaatctgaaggatcagtttaactatacccttagtacatatgaagaagctttaaaaaacagagagaacattgtttccatcactcaacaacaaaatgaggaactggctactcaactgcaacaagctctgacagagcgagcaaatatggaattacaacttcaacatgccagagaggcctcccaagtggccaatgaaaaagttcaaaagttggaaaggctggtggatgtactgaggaagaaggttggaaccgggaccatgaggacagtgatctgattgaaaaaaaacgacagtctggggaagcgatcacatctggtgaccaggctgcttcattcaacactgtgtaaacaccaaagccttaacttagcaaacagttgttagaagtgggacactccaaccacattccaagctgagataaaatcaaatcacaaatgtttaaccactttgctgctgacttgagttatttatccaaatatattaactatagacttttaccaatgggtagctataaggttacagcttattttgtaactattttatatctcaatatctttaatataaatctttttactgagagatcattatagaaacatgttaaagttggttaggatcatatcttcacatatggccctttctgaatcaaagtgcggcaaagtaaatattgtctaagctttaatccactgtgttaggtcaaaacttcaaatacatgcatttttcaatatagggtatatttcttaactgatgagagaggcttagacatgagtgtgtagtcttccttcaatgcgtgtatgtaatctttgttagtataaaagatattaaatataggtgccaagaattaaatgtataatttgtttaataagagatggatatattaaaattacattcatcaaggcatgatttttgtttcactacaaataatgcaaactgttttcaataaaaagaggagactgttaatgtgtacttataaattcacattgtcagtattttttaatattgggtctgaataattatctgaattctacttaagctataagtctctgtcatttttgcttgaaaattagcatgcctctgtcttaaaagagaccatcaaacctattaagtattcttattgtttatctttttttaattgccatttgatttttattgtggaggaggaggatctaatatataatattcaatacaattgtaatgtagaaatataagaatttagaaaaaagtaaacttgccatttggttaaggttacctgctttttattttattccagaaataagatagttacagcatagcagtcatatgaagttatgaatagaactgagatttttatgtaattagttataggcaaaatactttcatatttttagattagacagacgaaagaccaagaggaaatgactgtgcctggaacaggatgaaatagacaagtagagatttaattagcaaaaattttgtagggaagtaaaattttttctaagtctatacgtttttaattcatctttaagattgagctaaattatctaccattgcctatttacaggataagtacattcaggacaatttattgtaccattctttcatataccatagcagattatccatttcaatttttttttactccacaggaaaatgtaagctactttgtcatagatcacaaaagaatcataatgctaacaaactctatttcttccttattaaatctgtatccattaaagtaacttttttaactatgagaattagaaaataagggacaacaggggttaaaaataaactgatttaatttgctctatagtcctaaagagaattatatcctctcatagaccaatgactctataatagagaaatatgtaatgatttggtcatgcatggagtcttgtctctgggctctatttgaaacgtgtaacagctccctatgtgaagaaacattatctttaaagtcatctgggaggtgcaggtaagtaaagagaaacaatttttgtcacaaagtagtccattcctgatctcacttaaaataaatcacaagtaaatttgaattttcggtttaatgttgaaagcagatgaacttttcttgagttattttgtcttttagaatacacaaaatatagtataaagacatttcacaatttccaaacaaatctttctacgcttaaatgatcaaattagaaaaaccaattcctataattaatatgcagaacttttatagaatatgatattataaagttaaatttgcaaaataattctaacatccactattgttcagtataggtaatctcccaaaaatatcacatcctcttgaaaatgaattgtctacaaaatttcaaatgcaaagtattacagccaaatattatcttaattaatttcttacacttaaaagtgtccatcaacagtgtgtcagatggtctttatatattttttctgtatgaaggaatagccttgcctactgaagataggttctctatgtattcaacaataatgcaactttagaagtattccacactgctgagaaatgttgctttgagtttgctttacacatcatcaactctaaatcctatagtaacatgagaattcacttcttcttgtaaaaataagtaatttacaggaaaggcaaaatgctaatactaacatttgtagcacttgatgatttacaaagtccttttacatctgttttttcatttgatcctatcgacaatcataataataataaattatatatataacccatataataacgatggtgatgataattttagtattactgtcattataattattattatattcattctacagatgaggaaacagactcagtaagccttggaatttgccaaggactggctaggacctagaactaagatcttataaccacactccatgcaactatgagtctctaaatctctctgtaagaaaaaaatttcaaagtaaagattttactcttgcaatttctgttgtgatagtaccatctctttcacatactacatacaaattccctaataatcaaaagattgtacacatttttttcaatgaagtacaataatgtgaactgcatgtgtaaacagcatcacattattaccacctctctatggtattatagtggcagtatgctttgcctcagccttcactaattaggaatattgtgacaattcattgctaataaaacataacatgagtctctttgtactgtttttaatttggcctgatgctaaaacctatcagcttagttttttaacatggtagtctaaacttcaaggcttgctctatctcctagagcaatttagagctaaaaccagtaataagcaaagttattggttataagcaaggtataagcagttaaagcaaagttattaattattaatatatgagaatttaaaattttataaataagttagaaattattaatgtattttaaatatggagtaaaatattttgctaatttttttcaatgataaagttgatcctttgtatatttccttattcaaataaattcagtcatcttcttatcaggttgcttatttatataatttgtttattttattaaaaatctagaatattaaagatttatacttttaatattgaatatagtttcgtagaaaaacattttatatgtactattcttaaagatcacaattatttttaaactttctattttcaaatacttgtgattaataaggcattctatgatgaaatagccatggcttatatatttttgtcttttcacatatgatgtgtttggaacccaaattttttactgattttattgtgttgttggtaactagtatttacagctaacctatctattcatattttacatatatatatatatatatacatgcacacacaccgatacatttaccttttaaaaaaatgatttataagtgaactgttaggctccagtgatttcagtgttttgttcatgttttattggaaatgcacgtggtttcttaggcttttaaacaaatacatggaatggttgaaagatttattttgctcgtgcttagctaaatatgtcatctctagaaaagatgtggtttgttttggcactgttttaaaaactcaaatattttaaacatttgttaagttggagcttgcacatttaaaccagcagcatacgttccagaagagcatctcaagttaccaaattttttgtaatccttttactagaaaaatcttttttgaagagtttttcttgtgcttgcttcggcagcatatatactgaaattagaaaaagaaaacttttcttttttattatatattttagtgtaagttaagttaaacttctaaaagttgaattatttaatgtaggacttcataaatagtatttgacaatgataaatgtgtatttttgagaatcattaaaatgtatacaatgatattcctttgcagaagtcttaatatgcataatttttaatctaattgtcttctaaatatagttttggtgtatgctggtattttagaagccaccaatttctggactatctgattattaacaaagatgtattttaatgcacaaactcaaatgtttaaaatatatatttactttgtactcaaataaaatcccctattgcaaatcct

SEQ ID NO: 7332 - protein, 442 aa, Homo sapiens; identical to SEQ ID NO: 1010

SEQ ID NO: 7333 - DNA, 2384 bp, Homo sapiens
ggcgattggctgacgcggtggctgcgcactcggcctgagaaactcggcaagcgcgcagtgtcgactccccggtctatgccaggcgcatctcagctaatccaaaagtaaatgagaaacttagaaaaagattgccaattccaaatcaacatatttagagaaaattggaaaaggagaagcttactacagctttatttgaggactttttaaagaacgctgggttctatctgtgagctgcaaatcttggagcaaaaaccagagacattgccagagcaaacaagaacagaaatacaaatggagaactggtcaaaagtttgctacttcgcatatccctacttgaccttttttggagcaaatgcctttgtgaagtcttcctagagtcttccagacataacccacagttatcttgaacaagaaactacggggataaataaaagtacgcagccagatgagcaactgactatgaattctgagaaaagtatgcatcggaaatccactgaattagttaatgaaataacatgtgagaacacagaatggccagggcagagatcaacgaattttcagatcatcagttcttatccagatgatgagtctgtttactgcactactgaaaaatacaacgttatggaacatagacataatgatatgcattatgaatgtatgactccttgtcaagttacttcagactcagataaagagaagacaatagcatttcttctaaaagaattggatattctcagaacaagcaataaaaagcttcagcagaaattggctaaagaagataaagaacagagaaaactaaagtttaagctggaactccaagagaaagaaacagaagctaaaattgctgaaaagacagcagctctggttgaagaagtgtattttgcgcagaaggaacgtgatgaagctgttatgtctagactgcaattagccattgaggagagagatgaagcaattgcacgagccaagcatatggaaatgtctctaaaagtgctagaaaatattaaccctgaagaaaatgacatgacattacaggaattactgaacagaataaacaatgcagacacagggatagctattcagaagaatggagctataattgtggatagaatctacaagaccaaggaatgtaaaatgagaataactgcagaagaaatgagtgcactaatagaagaacgggatgctgccttgtctaagtgcaaacggttagagcaggagcttcatcatgtgaaagagcagaaccagacttcagcaaacaacatgagacatctgactgctgaaaacaatcaagaacgtgctctgaaggcaaagttgttatctatgcaacaagccagagaaactgcagttcaacagtacaaaaaactggaagaggaaatccagacccttcgagtttactacagtttacacaaatctttatctcaagaagaaaatctgaaggatcagtttaactatacccttagtacatatgaagaagctttaaaaaacagagagaacattgtttccatcactcaacaacaaaatgaggaactggctactcaactgcaacaagctctgacagagcgagcaaatatggaattacaacttcaacatgccagagaggcctcccaagtggccaatgaaaaagttcaaaagttggaaaggctggtggatgtactgaggaagaaggttggaaccgggaccatgaggacagtgatctgattgaaaaaaaacgacagtctggggaagcgatcacatctggtgaccaggctgcttcattcaacactgtgtaaacaccaaagccttaacttagcaaacagttgttagaagtgggacactccaaccacattccaagctgagataaaatcaaatcacaaatgtttaaccactttgctgctgacttgagttatttatccaaatatattaactatagacttttaccaatgggtagctataaggttacagcttattttgtaactattttatatctcaatatctttaatataaatctttttactgagagatcattatagaaacatgttaaagttggttaggatcatatcttcacatatggccctttctgaatcaaagtgcggcaaagtaaatattgtctaagctttaatccactgtgttaggtcaaaacttcaaatacatgcatttttcaatatagggtatatttcttaactgatgagagaggcttagacatgagtgtgtagtcttccttcaatgcgtgtatgtaatctttgttagtataaaagatattaaatataggtgccaagaattaaatgtataatttgtttaataagagatggatatattaaaattacattcatcaaggcatgatttttgtttcactacaaataatgcaaactgttttcaataaaaagaggagactgttaatgtgtacttat

SEQ ID NO: 7334 - protein, 411 aa, Homo sapiens
MNSEKSMHRKSTELVNEITCENTEWPGQRSTNFQIISSYPDDESVYCTTEKYNVMEHRHNDMHYECMTPCQVTSDSDKEKTIAFLLKELDILRTSNKKLQQKLAKEDKEQRKLKFKLELQEKETEAKIAEKTAALVEEVYFAQKERDEAVMSRLQLAIEERDEAIARAKHMEMSLKVLENINPEENDMTLQELLNRINNADTGIAIQKNGAIIVDRIYKTKECKMRITAEEMSALIEERDAALSKCKRLEQELHHVKEQNQTSANNMRHLTAENNQERALKAKLLSMQQARETAVQQYKKLEEEIQTLRVYYSLHKSLSQEENLKDQFNYTLSTYEEALKNRENIVSITQQQNEELATQLQQALTERANMELQLQHAREASQVANEKVQKLERLVDVLRKKVGTGTMRTVI

SEQ ID NO: 7335 - DNA, 2289 bp, Homo sapiens
ggtggctgcgcactcggcctgagaaactcggcaagcgcgcagtgtcgactccccggtctatgccaggcgcatctcagataccagcattgccaccggtgggtagaacactaagtgggctcttggagtccctgattccagaacttgactcttggatgacatttctggacctgctctgggccagagaggagaccacttcccttaagggaacgaggtctcactatattgcccagactggtctcgaactcctgggctcaaacagtccccctgcgttggcctcccaaagtgatggaattacaggtgtgaatcactgcatctgactatggcaaggatctctgtcactgagctaatccaaaagtaaatgagaaacttagaaaaagattgccaattccaaatcaacatatttagagaaaattggaaaaggagaagcttactacagctttatttgaggactttttaaagaacgctgggttctatctgtgagctgcaaatcttggagcaaaaaccagagacattgccagagcaaacaagaacagaaatacaaatggagaactggtcaaaagacataacccacagttatcttgaacaagaaactacggggataaataaaagtacgcagccagatgagcaactgactatgaattctgagaaaagtatgcatcggaaatccactgaattagttaatgaaataacatgtgagaacacagaatggccagggcagagatcaacgaattttcagatcatcagttcttatccagatgatgagtctgtttactgcactactgaaaaatacaacgttatggaacatagacataatgatatgcattatgaatgtatgactccttgtcaagttacttcagactcagataaagagaagacaatagcatttcttctaaaagaattggatattctcagaacaagcaataaaaagcttcagcagaaattggctaaagaagataaagaacagagaaaactaaagtttaagctggaactccaagagaaagaaacagaagctaaaattgctgaaaagacagcagctctggttgaagaagtgtattttgcgcagaaggaacgtgatgaagctgttatgtctagactgcaattagccattgaggagagagatgaagcaattgcacgagccaagcatatggaaatgtctctaaaagtgctagaaaatattaaccctgaagaaaatgacatgacattacaggaattactgaacagaataaacaatgcagacacagggatagctattcagaagaatggagctataattgtggatagaatctacaagaccaaggaatgtaaaatgagaataactgcagaagaaatgagtgcactaatagaagaacgggatgctgccttgtctaagtgcaaacggttagagcaggagcttcatcatgtgaaagagcagaaccagacttcagcaaacaacatgagacatctgactgctgaaaacaatcaagaacgtgctctgaaggcaaagttgttatctatgcaacaagccagagaaactgcagttcaacagtacaaaaaactggaagaggaaatccagacccttcgagtttactacagtttacacaaatctttatctcaagaagaaaatctgaaggatcagtttaactatacccttagtacatatgaagaagctttaaaaaacagagagaacattgtttccatcactcaacaacaaaatgaggaactggctactcaactgcaacaagctctgacagagcgagcaaatatggaattacaacttcaacatgccagagaggcctcccaagtggccaatgaaaaagttcaaaaatctcaaatacaaatctatttcattccaaataaaaaagatgaaagagaaaaattcctaatggataaaagaagaaagattgttgcacattcaaaacagaattcttgatagatacaaaatcatccaataaacttcagctagttttcagcattatatgcagttgatttgtccattcctcagtggaacttccaaatcatctaaaccagctttgtatgacactaagaataccctcattccttcagtgtctagctctgtgctgtgtttatttgcagaggaccctcatgcatggatccatataaatgaggcaaactgtgaagcagactagactgtgccgcttaccgtaaagtctttgagagaggaagattgtgtatatgaaaactgctaggcatgatatttacttataaggaagatttctatgtgtataacatcaagcaagatttttggttgaggttttatgctttcagtaaagaaaataaaagaagaaaacc

SEQ ID NO: 7336 - protein, 455 aa, Homo sapiens
MENWSKDITHSYLEQETTGINKSTQPDEQLTMNSEKSMHRKSTELVNEITCENTEWPGQRSTNFQIISSYPDDESVYCTTEKYNVMEHRHNDMHYECMTPCQVTSDSDKEKTIAFLLKELDILRTSNKKLQQKLAKEDKEQRKLKFKLELQEKETEAKIAEKTAALVEEVYFAQKERDEAVMSRLQLAIEERDEAIARAKHMEMSLKVLENINPEENDMTLQELLNRINNADTGIAIQKNGAIIVDRIYKTKECKMRITAEEMSALIEERDAALSKCKRLEQELHHVKEQNQTSANNMRHLTAENNQERALKAKLLSMQQARETAVQQYKKLEEEIQTLRVYYSLHKSLSQEENLKDQFNYTLSTYEEALKNRENIVSITQQQNEELATQLQQALTERANMELQLQHAREASQVANEKVQKSQIQIYFIPNKKDEREKFLMDKRRKIVAHSKQNS

SEQ ID NO: 7337 - DNA, 1114 bp, Homo sapiens
taaatgagggatttcttcttggtttggatccattgctggcaaagttgttatctatgcaacaagccagagaaactgcagttcaacagtacaaaaaactggaagaggaaatccagacccttcgagtttactacagtttacacaaatctttatctcaagaagaaaatctgaaggatcagtttaactatacccttagtacatatgaagaagctttaaaaaacagagagaacattgtttccatcactcaacaacaaaatgaggaactggctactcaactgcaacaagctctgacagagcgagcaaatatggaattacaacttcaacatgccagagaggcctcccaagtggccaatgaaaaagttcaaaagttggaaaggctggtggatgtactgaggaagaaggttggaaccgggaccatgaggacagtgatctgattgaaaaaaaacgacagtctggggaagcgatcacatctggtgaccaggctgcttcattcaacactgtgtaaacaccaaagccttaacttagcaaacagttgttagaagtgggacactccaaccacattccaagctgagataaaatcaaatcacaaatgtttaaccactttgctgctgacttgagttatttatccaaatatattaactatagacttttaccaatgggtagctataaggttacagcttattttgtaactattttatatctcaatatctttaatataaatctttttactgagagatcattatagaaacatgttaaagttggttaggatcatatcttcacatatggccctttctgaatcaaagtgcggcaaagtaaatattgtctaagctttaatccactgtgttaggtcaaaacttcaaatacatgcatttttcaatatagggtatatttcttaactgatgagagaggcttagacatgagtgtgtagtcttccttcaatgcgtgtatgtaatctttgttagtataaaagatattaaatataggtgccaagaattaaatgtataatttgtttaataagagatggatatattaaaattacattcatcaaggcatgatttttgtttcactacaaataatgcaaactgttttcaataaaaagaggagactgttaatgtgt

SEQ ID NO: 7338 - protein, 125 aa, Homo sapiens [sequence omitted]

SEQ ID NO: 7339 - DNA, 1248 bp, Homo sapiens
taaatgagggatttcttcttggtttggatccattgctggcaaagttgttatctatgcaacaagccagagaaactgcagttcaacagtacaaaaaactggaagaggaaatccagacccttcgagtttactacagtttacacaaatctttatctcaagaagaaaatctgaaggatcagtttaactatacccttagtacatatgaagaagctttaaaaaacagagagaacattgtttccatcactcaacaacaaaatgaggaactggctactcaactgcaacaagctctgacagagcgagcaaatatggaattacaacttcaacatgccagagaggcctcccaagtggccaatgaaaaagttcaaaagttggaaaggctggtggatgtactgaggaagaaggttggaaccgggaccatgaggacagtgatctgattgaaaaaaaacgacagtctggggaagcgatcacatctggtgaccaggctgcttcattcaacactgtgtaaacaccaaagccttaacttagcaaacagttgttagaagtgggacactccaaccacattccaagctgagataaaatcaaatcacaaatgtttaaccactttgctgctgacttgagttatttatccaaatatattaactatagacttttaccaatgggtagctataaggttacagcttattttgtaactattttatatctcaatatctttaatataaatctttttactgagagatcattatagaaacatgttaaagttggttaggatcatatcttcacatatggccctttctgaatcaaagtgcggcaaagtaaatattgtctaagctttaatccactgtgttaggtcaaaacttcaaatacatgcatttttcaatatagggtatatttcttaactgatgagagaggcttagacatgagtgtgtagtcttccttcaatgcgtgtatgtaatctttgttagtataaaagatattaaatataggtgccaagaattaaatgtataatttgtttaataagagatggatatattaaaattacattcatcaaggcatgatttttgtttcactacaaataatgcaaactgttttcaataaaaagaggagactgttaatgtgtacttataaattcacattgtcagtattttttaatattgggtctgaataattatctgaattctacttaagctataagtctctgtcatttttgcttgaaaattagcatgcctctgtcttaaaagagaccatcaaacc

SEQ ID NO: 7340 - protein, 125 aa, Homo sapiens [sequence omitted]

SEQ ID NO: 7341 - DNA, 617 bp, Homo sapiens
atagcacatcagtgaagacaaaaagagttgttactcagttctttaccctagaataaatcaaatcaacaaatatttattgaatgtctactatgtgcaaatagccctggactgttcagcttttaaaagccatccaacttttcacattaacaaatcaaagcattattatttcaagcattgcagaagctgcttccatgtccttaaggtgacaaagcatatgaggactttgcaagtacttggagtaaaggaagagaagagaattcacagagtgaaaagaggagaaagagtgctctaaaatatcaccaatggactgcaacatgtattgaagttagagacaaggtcatcagccaagactggggagaaagggagatgaaaaagcctggagaaagtttaactcatctaagaggctgttaagtgaatcaacaaaagatgccattttctattaagtcatctattttattaaagagttaaatgcaactgttgctgtatatcatgaatttatgaaagatttaggagtgggagttctttttttctcaaaaaaaatgagacaggttaccatctttttatataggagtggtacaaacctcttatttgaaatacccatcctagggtaaatattc

SEQ ID NO: 7342 - protein, 37 aa, Homo sapiens
MKDLGVGVLFFSKKMRQVTIFLYRSGTNLLFEIPILG

SEQ ID NO: 7343 - DNA, 3632 bp, Homo sapiens
cgcgcggccgcccgtcgcttcgcacagggctggatggttgtattgggcagggtggctccaggatgttaggaactgtgaagatggaagggcatgaaaccagcgactggaacagctactacgcagacacgcaggaggcctactcctccgtcccggtcagcaacatgaactcaggcctgggctccatgaactccatgaacacctacatgaccatgaacaccatgactacgagcggcaacatgaccccggcgtccttcaacatgtcctatgccaacccgggcctaggggccggcctgagtcccggcgcagtagccggcatgccggggggctcggcgggcgccatgaacagcatgactgcggccggcgtgacggccatgggtacggcgctgagcccgagcggcatgggcgccatgggtgcgcagcaggcggcctccatgaatggcctgggcccctacgcggccgccatgaacccgtgcatgagccccatggcgtacgcgccgtccaacctgggccgcagccgcgcgggcggcggcggcgacgccaagacgttcaagcgcagctacccgcacgccaagccgccctactcgtacatctcgctcatcaccatggccatccagcaggcgcccagcaagatgctcacgctgagcgagatctaccagtggatcatggacctcttcccctattaccggcagaaccagcagcgctggcagaactccatccgccactcgctgtccttcaatgactgcttcgtcaaggtggcacgctccccggacaagccgggcaagggctcctactggacgctgcacccggactccggcaacatgttcgagaacggctgctacttgcgccgccagaagcgcttcaagtgcgagaagcagccgggggccggcggcgggggcgggagcggaagcgggggcagcggcgccaagggcggccctgagagccgcaaggacccctctggcgcctctaaccccagcgccgactcgcccctccatcggggtgtgcacgggaagaccggccagctagagggcgcgccggcccccgggcccgccgccagcccccagactctggaccacagtggggcgacggcgacagggggcgcctcggagttgaagactccagcctcctcaactgcgccccccataagctccgggcccggggcgctggcctctgtgcccgcctctcacccggcacacggcttggcaccccacgagtcccagctgcacctgaaaggggacccccactactccttcaaccacccgttctccatcaacaacctcatgtcctcctcggagcagcagcataagctggacttcaaggcatacgaacaggcactgcaatactcgccttacggctctacgttgcccgccagcctgcctctaggcagcgcctcggtgaccaccaggagccccatcgagccctcagccctggagccggcgtactaccaaggtgtgtattccagacccgtcctaaacacttcctagctcccgggactggggggtttgtctggcatagccatgctggtagcaagagagaaaaaatcaacagcaaacaaaaccacacaaaccaaaccgtcaacagcataataaaatcccaacaactatttttatttcatttttcatgcacaacctttcccccagtgcaaaagactgttactttattattgtattcaaaattcattgtgtatattactacaaagacaaccccaaaccaatttttttcctgcgaagtttaatgatccacaagtgtatatatgaaattctcctccttccttgcccccctctctttcttccctctttcccctccagacattctagtttgtggagggttatttaaaaaaacaaaaaaggaagatggtcaagtttgtaaaatatttgtttgtgctttttccccctccttacctgaccccctacgagtttacaggtctgtggcaatactcttaaccataagaattgaaatggtgaagaaacaagtatacactagaggctcttaaaagtattgaaagacaatactgctgttatatagcaagacataaacagattataaacatcagagccatttgcttctcagtttacatttctgatacatgcagatagcagatgtctttaaatgaaatacatgtatattgtgtatggacttaattatgcacatgctcagatgtgtagacatcctccgtatatttacataacatatagaggtaatagataggtgatatacatgatacattctcaagagttgcttgaccgaaagttacaaggaccccaacccctttgtcctctctacccacagatggccctgggaatcaattcctcaggaattgccctcaagaactctgcttcttgctttgcagagtgccatggtcatgtcattctgaggtcacataacacataaaattagtttctatgagtgtataccatttaaagaatttttttttcagtaaaagggaatattacaatgttggaggagagataagttatagggagctggatttcaaaacgtggtccaagattcaaaaatcctattgatagtggccattttaatcattgccatcgtgtgcttgtttcatccagtgttatgcactttccacagttggacatggtgttagtatagccagacgggtttcattattatttctctttgctttctcaatgttaatttattgcatggtttattctttttctttacagctgaaattgctttaaatgatggttaaaattacaaattaaattgttaatttttatcaatgtgattgtaattaaaaatattttgatttaaataacaaaaataataccagattttaagccgtggaaaatgttcttgatcatttgcagttaaggactttaaataaatcaaatgttaacaaaagagcatttctgttattttttttcacttaactaaatccgaagtgaatatttctgaatacgatatttttcaaattctagaactgaatataaatgacaaaaatgaaaataaaattgttttgtctgttgttataatgaatgtgtagctagtaaaaaggagtgaaagaaattcaagtaaagtgtataagttgatttaatattccaagagttgagatttttaagattctttattcccagtgatgtttacttcatttttttttttttttttgacaccggcttaagccttctgtgtttcctttgagccttttcactacaaaatcaaatattaatttaactacctttcctccttccccaatgtatcacttttctttatctgagaattcttccaatgaaaataaaatatcagctgtggctgatagaattaagttgtgtccaacggagactcatgaactctcttctcattaaaagagaaacgaaacttagccatcagggtagctctggaggaggtgggaggaggggagttaattcactctcgcaggggaagcgttgtaccgacaggacattttagggtagccgctattttgcattttgtgaagattgttttaaattttgattcaaaaatgtcgttcctaagaacttaaagttgataatttgtttccttctaaggagcttttaaatgcaacttcacactccatagttgcttgggatcacaaaatcattaatctcctttgatagcaggctcactttccagtccacctatttctttgtaagtct

SEQ ID NO: 7344 - protein, 472 aa, Homo sapiens; identical to SEQ ID NO: 1012

SEQ ID NO: 7345 - DNA, 3108 bp, Homo sapiens
taagatccacatcagctcaactgcacttgcctcgcagaggcagcccgctcacttcccgcggaggcgctccccggcgccgcgctccgcggcagccgcctgcccccggcgctgcccccgcccgccgcgccgccgccgccgccgcgcacgccgcgccccgcagctctgggcttcctcttcgcccgggtggcgttgggcccgcgcgggcgctcgggtgactgcagctgctcagctcccctcccccgccccgcgccgcgcggccgcccgtcgcttcgcacagggctggatggttgtattgggcagggtggctccaggatgttaggaactgtgaagatggaagggcatgaaaccagcgactggaacagctactacgcagacacgcaggaggcctactcctccgtcccggtcagcaacatgaactcaggcctgggctccatgaactccatgaacacctacatgaccatgaacaccatgactacgagcggcaacatgaccccggcgtccttcaacatgtcctatgccaacccgggcctaggggccggcctgagtcccggcgcagtagccggcatgccggggggctcggcgggcgccatgaacagcatgactgcggccggcgtgacggccatgggtacggcgctgagcccgagcggcatgggcgccatgggtgcgcagcaggcggcctccatgaatggcctgggcccctacgcggccgccatgaacccgtgcatgagccccatggcgtacgcgccgtccaacctgggccgcagccgcgcgggcggcggcggcgacgccaagacgttcaagcgcagctacccgcacgccaagccgccctactcgtacatctcgctcatcaccatggccatccagcaggcgcccagcaagatgctcacgctgagcgagatctaccagtggatcatggacctcttcccctattaccggcagaaccagcagcgctggcagaactccatccgccactcgctgtccttcaatgactgcttcgtcaaggtggcacgctccccggacaagccgggcaagggctcctactggacgctgcacccggactccggcaacatgttcgagaacggctgctacttgcgccgccagaagcgcttcaagtgcgagaagcagccgggggccggcggcgggggcgggagcggaagcgggggcagcggcgccaagggcggccctgagagccgcaaggacccctctggcgcctctaaccccagcgccgactcgcccctccatcggggtgtgcacgggaagaccggccagctagagggcgcgccggcccccgggcccgccgccagcccccagactctggaccacagtggggcgacggcgacagggggcgcctcggagttgaagactccagcctcctcaactgcgccccccataagctccgggcccggggcgctggcctctgtgcccgcctctcacccggcacacggcttggcaccccacgagtcccagctgcacctgaaaggggacccccactactccttcaaccacccgttctccatcaacaacctcatgtcctcctcggagcagcagcataagctggacttcaaggcatacgaacaggcactgcaatactcgccttacggctctacgttgcccgccagcctgcctctaggcagcgcctcggtgaccaccaggagccccatcgagccctcagccctggagccggcgtactaccaaggtgtgtattccagacccgtcctaaacacttcctagctcccgggactggggggtttgtctggcatagccatgctggtagcaagagagaaaaaatcaacagcaaacaaaaccacacaaaccaaaccgtcaacagcataataaaatcccaacaactatttttatttcatttttcatgcacaacctttcccccagtgcaaaagactgttactttattattgtattcaaaattcattgtgtatattactacaaagacaaccccaaaccaatttttttcctgcgaagtttaatgatccacaagtgtatatatgaaattctcctccttccttgcccccctctctttcttccctctttcccctccagacattctagtttgtggagggttatttaaaaaaacaaaaaaggaagatggtcaagtttgtaaaatatttgtttgtgctttttccccctccttacctgaccccctacgagtttacaggtctgtggcaatactcttaaccataagaattgaaatggtgaagaaacaagtatacactagaggctcttaaaagtattgaaagacaatactgctgttatatagcaagacataaacagattataaacatcagagccatttgcttctcagtttacatttctgatacatgcagatagcagatgtctttaaatgaaatacatgtatattgtgtatggacttaattatgcacatgctcagatgtgtagacatcctccgtatatttacataacatatagaggtaatagataggtgatatacatgatacattctcaagagttgcttgaccgaaagttacaaggaccccaacccctttgtcctctctacccacagatggccctgggaatcaattcctcaggaattgccctcaagaactctgcttcttgctttgcagagtgccatggtcatgtcattctgaggtcacataacacataaaattagtttctatgagtgtataccatttaaagaatttttttttcagtaaaagggaatattacaatgttggaggagagataagttatagggagctggatttcaaaacgtggtccaagattcaaaaatcctattgatagtggccattttaatcattgccatcgtgtgcttgtttcatccagtgttatgcactttccacagttggacatggtgttagtatagccagacgggtttcattattatttctctttgctttctcaatgttaatttattgcatggtttattctttttctttacagctgaaattgctttaaatgatggttaaaattacaaattaaattgttaatttttatcaatgtgattgtaattaaaaatattttgatttaaataacaaaaataataccagattttaagccgtggaaaatgttcttgatcatttgcagttaaggactttaaataaatcaaatgttaac

SEQ ID NO: 7346 - protein, 472 aa, Homo sapiens; identical to SEQ ID NO: 1012

SEQ ID NO: 7347 - DNA, 1159 bp, Homo sapiens
aagggcatgaaaccagcgactggaacagctactacgcagacacgcaggagcgagcgggagcaggagccgggcccggggtgcagcgggcgggcgagcgccggtgcgagttggaagcaactctgagaaagccggagcatacccacaaggcgacctcttcgtcccaccgtttaattcgcagacgtcttctgattaaagcgctctgccgccaagttgggtgtctcaataatgaaacgatttctaaattttgtaaaacttgttcttcaaaagccctatttggggagaagtgtgctccttctctaaaaccgctgggtggcgctagtgcgaccaaaatcttcttcacaactctgggccgagaacctgtttctcttcattgtccccttggtggcacgttcatgggggttatttttacaatgtgcacaaaaggattacagggaaaaccagttacagggaggactaccacctattaaaagtatttttctggaaacagctggcgattaccctccaaaagtttaattaccattattgaaaacgcgtattggaactgccttggataatcttgggaagagggaaagaaaataaagccccaaggtaaaaaatacttttaagacgtggacagaaaaatataggatcacgtaatattttgatggtaactgacttatttagatttatgtattcacaagtttacctctgagtttatttgcataccatagtttactgggtgttcctatttaaatctatttgttctcatattttcaaattgagtcatacttgctgattaaaataaacttaaggacatcattattccttattaaattaccagaggagtgctttttaatatgcctaggttttgtatgtttaaaatactgtacctaatgcattcccacatcgctattgataaggattttcgcttgttgatgattttaaaaggagctcagaggtcttccagagatttaattctgacgcagtcatctcgaccccaccattcaattaagacccctagcgaaagtactttcttacatgttaaagctgagaattaggaaatacaatagcattaagagaaaataagtagaatttgattttcgaattttaaattattcaagactactcacggaatctcaaagccaggcgttgaaatcatcggcagcaacatcagcatgtg

SEQ ID NO: 7348 - protein, 38 aa, Homo sapiens
MKPATGTATTQTRRSEREQEPGPGCSGRASAGASWKQL

SEQ ID NO: 7349 - DNA, 392 bp, Homo sapiens
acaaaaaaaaaaagttatgtcataaagatataaaccggtgctgtgactcacctgctcttagccgcaggtgcgagcgtctttgtgcggcggacaaatggggagaggacgaggaggtgggcactcaagcgacgtaagatccacatcagctcaactgcacttgcctcgcagaggcagcccgctcacttcccgcggaggcgctccccggcgccgcgctccgcggcagccgcctgcccccggcgctgcccccgcccgccgcgccgccgccgccgccgcgcacgccgcgccccgcagctctgggcttcctcttcgcccgggtggcgttgggcccgcgcgggcgctcgggtgactgcagctgctcagctcccctcccccgccccgcgccgcgcggccgc

SEQ ID NO: 7350 - protein, 83 aa, Homo sapiens
MGRGRGGGHSSDVRSTSAQLHLPRRGSPLTSRGGAPRRRAPRQPPAPGAAPARRAAAAAAHAAPRSSGLPLRPGGVGPARALG

SEQ ID NO: 7351 - DNA, 1220 bp, Homo sapiens
tgagagcttcagactagaaaagggaaaaagccccacttttgcttcgtcactagaaaccgggtcatctgagtcagccgagccaagtgacgttaggccgacccgggccccgggctagcagagcggaggcgctgccacgaaactcgtacctgcggctaagagcaggaaaaccctttcctgtatgccatctgttttctgtggggccctgagtgatgaggagaggaacaaggattcatggaagtgaggtcaaatttgtcaagatgtccacaatcccgagacactttggcctgaaatacaaagaggaatcgtatatgtttaaagagcttgagaaagttcggcaggaaactaaaaaggattttctccgattcaagcagaagttggcctccaagccggctgtagatgaaagcccagtccacagcctccatgcccccggcccggcccgccccgcgcgcgtttcctgcgccgcagcccggacgtcgagaagatacccttcgcttaaaggccctgcgatgtccgcggccgccctcctgcaggaggtgctcggaggcgcgccgcgtccctcgggcctgggtgaggcggcggctccaggcaagacccggtcgtttcgcccccgggacttttacttgcggagctccgcgttcctacggcaccaggccctgaaaaagcccccagtcatcgcctcggggttcggcacggccagacccgtggtcctgctgcctccgcccgagccacccgtgaagcgcagagcgcgcggggtcttggagagctcgcggcacgcggctcccaggcgggtcttccacttgggaagggagcgcgaacagagccaggaggtagctcctctcgcagggccctgcatggccaaagagaggaaggccagctccgtctccgcagaggacggctacatggaggccagcagcgggcggaggaaagtgaggatccgcagcaacttcgtgagcgagagcggggcccgcgaggcgcgggaagcggcggggttaggagcccagggagaacaggagagctggccgcccagcgacgcgcgggaggccgcctggcaggcgctgctgccctcccgcgtgatccccacgtccatcgaagagatcatcgcctctctgcagtccgaggcccagctggcctccgaccagaccatcaaagagctcatacggagcgtccttggccagaactacgacattacaatggaagtaggtgaaccaaaacaagagtaa

SEQ ID NO: 7352 - protein, 336 aa, Homo sapiens [sequence omitted]

SEQ ID NO: 7353 - DNA, 415 bp, Homo sapiens
attttcagaaagcagttggtgtagataactgaaactgcagaagagaaaactgtgaataaaagggaacaactgtacccttacaaccaccactgtaatcaagaggtataacagcttcatcagttcaacactgaaactggacattgtagaagatgaattatgagagtgatttatgaaagaaagacagtggagaattgcaatcgatggagacattcaaagaaaagactttggcactacatcaaaagagagtagaataaatgacgaaactaaagcacaaagagattaaagaacttatccaaggtcatgcagctggaaagaagtggatttgggattgtgaacatcacaatttcacaaactacatttcatgatgggtagagctagtcaaacgtctgaaaataaagtttggtttaaagatgac

SEQ ID NO: 7354 - protein, 37 aa, Homo sapiens
MKERQWRIAIDGDIQRKDFGTTSKESRINDETKAQRD

SEQ ID NO: 7355 - DNA, 477 bp, Homo sapiens
gcagacttcctaggtagctctgaaacaggtggtctgtagaccacactttaagaattatcttcaaggattgggctagttttagtttgtagtgatttcttgtgtctcttaatgaaggcctagacaatatagtctggattgattggataaacacagaggaacaagagagcggcagaattgtaccatgcatgcagcaggccatgctctacacgggcctctcaggatgcagcagagaggtaccctggatatacaggctttttggaatactgatgtgagtgtagaggccagaaaaatgaagctaggtggtattggaggagaatctctgaagactgctctcagtaggctgacaacaagttaagatgaatgtgtaactgttttctacattcttcttactgctataaaaataattgaaatgcagaatgcttaacttcattcagctgtaagccttgtaagaacatcaataaaaatttaaaaattcta

SEQ ID NO: 7356 - protein, 57 aa, Homo sapiens
MHAAGHALHGPLRMQQRGTLDIQAFWNTDVSVEARKMKLGGIGGESLKTALSRLTTS

SEQ ID NO: 7357 - DNA, 2911 bp, Homo sapiens
cgcttactgaataaggtgggatccaacaagagtgtagtatggaatgcaatagcttatgaattactttttttctgagggagctcaacagaatgacacctaagaaagggaaagtctttgacacttggtacgtttgtgatttttggtcattacttgaaaattaataagtttgaaatcactactcttagaaatggaagaaagtgatgactctaatcagcctatctcagcgtgtaggcaagaaattcgaaagagaagatgacccagcaaaccaatggtaggcaaatcccagcaaactgatgtaatagagaaaaagaaacacatggccataccaaaatcatctagccccaaagctacccatcgtattggtaatacttctggaagcaaaggcagctactctgccaaagcctatgagtctattagagtatcttctgagcttcagcaaacttggacaaagagaaagcatggacaggaaatgactagtaagtctctccagacagacaccattgtagaagagaaaaaagaagtcaagttagttgaggaaaccgtggtacctgaagaaaagtcagctgatgttagagaagctgctattgaattgccagagagtgttcaggatgtagaaattccaccaaacataccttcagttcaactaaaaatggacagatctcagcagaccagccgtacaggatactggaccatgatgaacatcccccctgtagaaaaagtggacaaggaacaacagacatactttagtgaatcagaaatagtggttatttccaggccagatagttcttctacaaagtcaaaggaagatgccctgaaacataaatcgtcgggaaagatttttgctagtgaacaccctgaatttcaaccagcaacaaacagcaatgaagaaattgggcagaaaaatatcagcagaacttcatttactcaggagactaaaaaaggtcccccggtacttttagaagatgagcttagggaagaagtaactgtacctgttgtacaagaaggttctgctgttaaaaaagtggcttctgctgaaatagagcctccatcaacagaaaaattcccagctaaaatacagcctccattagttgaagaggccactgctaaagcggagcccagacctgctgaagagacccatgtccaagtacagccatcaactgaagagactcctgatgctgaggcagccactgcagttgcggagaattctgttaaagttcagcctccacctgctgaagaggcccctttagtggagtttcctgctgaaattcagcctccatcagctgaagagtctccttctgtagagcttctggctgaaattctgcctccatcagctgaagagtccccttcagaagagcctcctgctgaaattctgcctccaccagctgaaaagtctccttcagtagagcttcttggtgaaattcggtctccctcagcacaaaaggctcccattgaagtacagcctttaccagctgagggcgcccttgaagaggccccagctaaagtagagcctcccactgttgaagagacccttgctgatgttcagcctctattacctgaagaggctcctagagaagaggctcgagaacttcagctttcaacagctatggagacccctgcagaagaggctcctactgaatttcagtctccattacctaaagagaccactgcagaagaggcctctgctgaaattcagcttctagcagctacggagcctcctgcagatgaaactcctgccgaagctcggtctccactatctgaggagacttctgcagaagaggctcatgctgaagttcaatctccattagctgaagagaccactgcagaagaggcctctgctgaaattcagcttctagcagctatagaggctcctgcagatgaaactcctgctgaagctcagtctccactatctgaggagacttctgcagaagaggctcctgctgaagttcagtctccatcagctaagggagtttctatagaagaggcccctcttgagcttcagcctccatcaggtgaagagaccactgcagaagaggcctctgctgcaattcagcttctagcagctacagaggcttctgcagaagaggctcctgctgaagttcagcctccaccagctgaggaggcccccgctgaagttcagcctccaccagctgaggaggcccccgctgaagttcagcctccaccagctgaggaggcccccgctgaagttcagcctccaccagctgaggaggcccccgctgaagttcagcctccaccagctgaggaggcccccgctgaagttcagcctccaccagctgaggaggcccctgctgaagttcagtctctaccagctgaggagactcctatagaagagacccttgctgcagtacactctcccccagctgatgatgtccctgcagaagaggcctccgttgacaaacattccccaccagctgatttgcttctgactgaggagtttcctataggagaggcctctgctgaagtttcacctccaccatctgaacaaacccctgaagatgaggctctggtagagaatgtgtctacagaatttcagtcaccgcaggtggcaggaattccagcagtaaaattaggatcggttgttttggaaggtgaagcaaaatttgaagaggtttcaaaaatcaattctgtccttaaagatttgtctaataccaatgatggacaggctcccactcttgaaatagaaagtgtttttcatatagaattaaaacaacgtcctcctgaactgtagtcaggttgtacctaagctagcaatcagaagctacatggttttggaagaacatactttagaaaagggtgggcagcgggaagtagctttgtcaataaggcaaattaaaggggaccccaagacttggaatacaggttggaaaatgaacaataaaaactgtagcagcat

SEQ ID NO: 7358 - protein, 825 aa, Homo sapiens
MVGKSQQTDVIEKKKHMAIPKSSSPKATHRIGNTSGSKGSYSAKAYESIRVSSELQQTWTKRKHGQEMTSKSLQTDTIVEEKKEVKLVEETVVPEEKSADVREAAIELPESVQDVEIPPNIPSVQLKMDRSQQTSRTGYWTMMNIPPVEKVDKEQQTYFSESEIVVISRPDSSSTKSKEDALKHKSSGKIFASEHPEFQPATNSNEEIGQKNISRTSFTQETKKGPPVLLEDELREEVTVPVVQEGSAVKKVASAEIEPPSTEKFPAKIQPPLVEEATAKAEPRPAEETHVQVQPSTEETPDAEAATAVAENSVKVQPPPAEEAPLVEFPAEIQPPSAEESPSVELLAEILPPSAEESPSEEPPAEILPPPAEKSPSVELLGEIRSPSAQKAPIEVQPLPAEGALEEAPAKVEPPTVEETLADVQPLLPEEAPREEARELQLSTAMETPAEEAPTEFQSPLPKETTAEEASAEIQLLAATEPPADETPAEARSPLSEETSAEEAHAEVQSPLAEETTAEEASAEIQLLAAIEAPADETPAEAQSPLSEETSAEEAPAEVQSPSAKGVSIEEAPLELQPPSGEETTAEEASAAIQLLAATEASAEEAPAEVQPPPAEEAPAEVQPPPAEEAPAEVQPPPAEEAPAEVQPPPAEEAPAEVQPPPAEEAPAEVQPPPAEEAPAEVQSLPAEETPIEETLAAVHSPPADDVPAEEASVDKHSPPADLLLTEEFPIGEASAEVSPPPSEQTPEDEALVENVSTEFQSPQVAGIPAVKLGSVVLEGEAKFEEVSKINSVLKDLSNTNDGQAPTLEIESVFHIELKQRPPEL

SEQ ID NO: 7359 - DNA, 2616 bp, Homo sapiens
agttataacagagactaaagaagaaagacgcttactgaataaggtgggatccaacaagagtgtagtatggaatgcaatagcttatgaattactttttttctgagggagctcaacagaatgacacctaagaaagggaaagtctttgacacttggtacgtttgtgatttttggtcattacttgaaaattaataagtttgaaatcactactcttagaaatggaagaaagtgatgactctaatcagcctatctcagcgtgtaggcaagaaattcgaaagagaagatgacccagcaaaccaatggtaggcaaatcccagcaaactgatgtaatagagaaaaagaaacacatggccataccaaaatcatctagccccaaagctacccatcgtattggtaatacttctggaagcaaaggcagctactctgccaaagcctatgagtctattagagtatcttctgagcttcagcaaacttggacaaagagaaagcatggacaggaaatgactagtaagtctctccagacagacaccattgtagaagagaaaaaagaagtcaagttagttgaggaaaccgtggtacctgaagaaaagtcagctgatgttagagaagctgctattgaattgccagagagtgttcaggatgtagaaattccaccaaacataccttcagttcaactaaaaatggacagatctcagcagaccagccgtacaggatactggaccatgatgaacatcccccctgtagaaaaagtggacaaggaacaacagacatactttagtgaatcagaaatagtggttatttccaggccagatagttcttctacaaagtcaaaggaagatgccctgaaacataaatcgtcgggaaagatttttgctagtgaacaccctgaatttcaaccagcaacaaacagcaatgaagaaattgggcagaaaaatatcagcagaacttcatttactcaggagactaaaaaaggtcccccggtacttttagaagatgagcttagggaagaagtaactgtacctgttgtacaagaaggttctgctgttaaaaaagtggcttctgctgaaatagagcctccatcaacagaaaaattcccagctaaaatacagcctccattagttgaagaggccactgctaaagcggagcccagacctgctgaagagacccatgtccaagtacagccatcaactgaagagactcctgatgctgaggcagccactgcagttgcggagaattctgttaaagttcagcctccacctgctgaagaggcccctttagtggagtttcctgctgaaattcagcctccatcagctgaagagtctccttctgtagagcttctggctgaaattctgcctccatcagctgaagagtccccttcagaagagcctcctgctgaaattctgcctccaccagctgaaaagtctccttcagtagagcttcttggtgaaattcggtctccctcagcacaaaaggctcccattgaagtacagcctttaccagctgagggcgcccttgaagaggccccagctaaagtagagcctcccactgttgaagagacccttgctgatgttcagcctctattacctgaagaggctcctagagaagaggctcgagaacttcagctttcaacagctatggagacccctgcagaagaggctcctactgaatttcagtctccattacctaaagagaccactgcagaagaggcctctgctgaaattcagcttctagcagctacggagcttctgcagaagaggctcctgctgaagttcagtctccatcagagaagaggctcctgctgaagttcagcctccaccagctgaggaggcccccgctgaagttcagcctccaccagctgaggaggcccccgctgaagttcagcctccaccagctgaggaggcccccgctgaagttcagcctccaccagctgaggaggcccccgctgaagttcagcctccaccagctgaggaggcccccgctgaagttcagcctccaccagctgaggaggcccctgctgaagttcagtctctaccagctgaggagactcctatagaagagacccttgctgcagtacactctcccccagctgatgatgtccctgcagaagaggcctccgttgacaaacattccccaccagctgatttgcttctgactgaggagtttcctataggagaggcctctgctgaagtttcacctccaccatctgaacaaacccctgaagatgaggctctggtagagaatgtgtctacagaatttcagtcaccgcaggtggcaggaattccagcagtaaaattaggatcggttgttttggaaggtgaagcaaaatttgaagaggtttcaaaaatcaattctgtccttaaagatttgtctaataccaatgatggacaggctcccactcttgaaatagaaagtgtttttcatatagaattaaaacaacgtcctcctgaactgtagtcaggttgtacctaagctagcaatcagaagctacatggttttggaagaacatactttagaaaagggtgggcagcgggaagtagctttgtcaataaggcaaattaaaggggaccccaagacttggaatacaggttggaaaatgaacaataaaaactgtagcagcat

SEQ ID NO: 7360 - protein, 500 aa, Homo sapiens
MVGKSQQTDVIEKKKHMAIPKSSSPKATHRIGNTSGSKGSYSAKAYESIRVSSELQQTWTKRKHGQEMTSKSLQTDTIVEEKKEVKLVEETVVPEEKSADVREAAIELPESVQDVEIPPNIPSVQLKMDRSQQTSRTGYWTMMNIPPVEKVDKEQQTYFSESEIVVISRPDSSSTKSKEDALKHKSSGKIFASEHPEFQPATNSNEEIGQKNISRTSFTQETKKGPPVLLEDELREEVTVPVVQEGSAVKKVASAEIEPPSTEKFPAKIQPPLVEEATAKAEPRPAEETHVQVQPSTEETPDAEAATAVAENSVKVQPPPAEEAPLVEFPAEIQPPSAEESPSVELLAEILPPSAEESPSEEPPAEILPPPAEKSPSVELLGEIRSPSAQKAPIEVQPLPAEGALEEAPAKVEPPTVEETLADVQPLLPEEAPREEARELQLSTAMETPAEEAPTEFQSPLPKETTAEEASAEIQLLAATELLQKRLLLKFSLHQRRGSC

SEQ ID NO: 7361 - DNA, 361 bp, Homo sapiens
agtgagaatctactttttgaaacaagttgaaaaaaagcatttgtctacaaaagaacatcagatactgcactttttacaaattgaatgtttgtggcaagcctgcatcgagaaagtccattgatgccatttttttcaaacagaaaagtaaagatgtttctggaaggcaccaggagtcctgtctgcactgagcaccatgaagttcacctgcattgagttctttccctttgtacaacacttactcccagaccaaaaaataactccttctctccaatctgtgttccaggcaaaccaatagactccagttgtctcccgaaatgcttaaagtgcttttccaatatccactatgtttgggcaacatatt

SEQ ID NO: 7362 - protein, 42 aa, Homo sapiens
MFVASLHRESPLMPFFSNRKVKMFLEGTRSPVCTEHHEVHLH

SEQ ID NO: 7363 - DNA, 451 bp, Homo sapiens
attaggcaaattgatagccctacaatggcctctaagtgttcacgtgaaaagaagaatcacagacctctcatttgaaattcatgttgttttcatgcctgctaacacaacatccattctgcagcgcatggatcaagggttaattttgattttcaatgttattatttaaatatatttcataatgctatggctgccatagatagtgattccattaatggatctgaaattgaaggaaaagtaaagatgtttctggaaggcaccaggagtcctgtctgcactgagcaccatgaagttcacctgcattgagttctttccctttgtacaacacttactcccagaccaaaaaataactccttctctccaatctgtgttccaggcaaaccaatagactccagttgtctcccgaaatgcttaaagtgcttttccaatatccactatgtttgggcaacatatt

SEQ ID NO: 7364 - protein, 39 aa, Homo sapiens
MAAIDSDSINGSEIEGKVKMFLEGTRSPVCTEHHEVHLH

SEQ ID NO: 7365 - DNA, 641 bp, Homo sapiens
ctggccggctcgggattccgggctttcttcccgagaccgcgtcccccagctgggccgaaggtggacgctcaggggctggaggctcagcggaatcccctgcgttcagtagccccgctctcccctgtcccgaaggattactctgcccctcagcggttccagtgccctcaaagcaatctgtctctgaagtactggctatcttctgagcgtgtgccagaagatccagctttgttgaaaagcgaagccgttagtcccttaatacaaaggagacaaattgatttatgcctggggcaccatcaccaaaagaagaggaaatggatgcaagccttcccagaacaacaggtgcagtaaagaagctggccaaaacccaccaaaaccaagatggtgaagagagtgacctttggttgttttcactgctacactccgaccagcaccatgacagtttacaaatgctacagcaatgtcaggaagctaccccatacagtctaaaaaggggaggaatgaataatcgaccccttgtttagcaaatcatcaagaaataaccataaaaatgggcaaccagcagccctcagggctgctctgcctatggagtagccattctttttattcttttactttcttaataaacttgctttcactttaca

SEQ ID NO: 7366 - protein, 80 aa, Homo sapiens
MPGAPSPKEEEMDASLPRTTGAVKKLAKTHQNQDGEESDLWLFSLLHSDQHHDSLQMLQQCQEATPYSLKRGGMNNRPLV

SEQ ID NO: 7367 - DNA, 2185 bp, Homo sapiens
ctccgcgcgcctgcccacgcgctccggtactcgctgctcgcggctggccggctcgggattccgggctttcttcccgagaccgcgtcccccagctgggccgaaggtggacgctcaggggctggaggctcagcggaatcccctgcgttcagtagccccgctctcccctgtcccgaaggattactctgcccctcagcggttccagtgccctcaaagcaatctgtctctgaagtactggctatcttctgagcgtgtgccagaagatccagctttgttgaaaagcgaagccgttagtcccttaatacaaaggagacaaattgatttatgcctggggcaccatcaccaaaagaagaggaaatggatgcaagccttcccagaacaacagaaagagtctcgctctgttgccaggctgaagtgctatggtgtgatctcagctcactgcaacctccgctttctgggttcaagcaattctcatgcctcagcctcccgagtagctgggattacaggcacatgccaccacgcccagctaatttttgtaatcttagtagagatggagtttcaccatgttagccaggctggtcttgaactcctgacctcaagtaatccgccagcctcagcctcccaaagtgctgggattacaggtgtgagccactgtgctcagccaaaaaacttgcattttaaagaaagttttccagaactgggcttgttccattcaataagtagattgagttacaactatgcacttagcttcatgtgacactgaagggaatatgaagaagaaagaagacaaattctgcttatactctgataggacgacctctgctattttccttctgaagctttgcagagagcagtgaattgtaatgaaaggagatttgggagtaaagactccgtgaggtattgaagtctctaggggaacctcattatagcattcctcttcccagcctggattctgaacaatttgagaaataaaaagcaaatgtgaagcacactgaggccaaagtatcacctttagaaccagtaaagatgaattggaattccaggcatggcaggccaaggcagacatcatccttagaggcagagtccctggaggggaagaggaaggagataaagctgaagcaagcaagccagggcaagtcactttgacaccccagggacagaaagggaccaggagtatggtcagctgcaactaggaactggggaaagatgttcccgcatcactggttttttccgctcctcagatgcgtgacgttggatgagtccattaatccctctatccattatcatcttttctaaaccaaaggattttactagatcatctctgaaatttcttccaggtctacagtggtatgattatataaattactagacccatagtaaatcatctaagagctcatatgaccttatttagaaaggaaattacaaatcttttacacttggatctggaattgcttttgtaaatgtgaagctactatgagttgaattacacttttgtttcagagattgactttatgaagatccttaggaagttttaaagttgaataagattcttcttcttacctttaatcatcacttttacatctcatttgtggagaatcaaaagtcactggaatcaaaagtcactgacccacaaagtgtcttcctcttgcaagatgggcaaatggatccacaacaacataaaacccagcatcacactgacggttacagatctgtttctgccgggttgagtctcctggccaccagaatcccagagctctcacccaggctgagatgcaaaagccacaagcacagtggggagagaggaaaataagagaaggagcccatgactttgagatgtgaaataaaggagaaccaacaatactctgtgcctactcatgagcacctcggtgtactccagaactttcatttcaaaaagttaaataggaacctttgtccagagattggctcagatgttctcattagatcttagcttgaagcctcttctgccagttcctccctgtttttatagtaagtctcataaggcatggtcctggacccacagccctgtatcatatggaaaaatgatgcaggccgggcatggtggctcatgcctgtaatcccagcactttgggaagccaaggcgggtggatcatttgaggtcaggagttcaagaccagcctggccaacatgatgaaaccccatctctact

SEQ ID NO: 7368 - protein, 131 aa, Homo sapiens
MQAFPEQQKESRSVARLKCYGVISAHCNLRFLGSSNSHASASRVAGITGTCHHAQLIFVILVEMEFHHVSQAGLELLTSSNPPASASQSAGITGVSHCAQPKNLHFKESFPELGLFHSISRLSYNYALSFM

SEQ ID NO: 7369 - DNA, 1953 bp, Homo sapiens
ggacagccgccggcccgcctctgcctccgcgcgcctgcccacgcgctccggtactcgctgctcgcggctggccggctcgggattccgggctttcttcccgagaccgcgtcccccagctgggccgaaggtggacgctcaggggctggaggctcagcggaatcccctgcgttcagtagccccgctctcccctgtcccgaaggattactctgcccctcagcggttccagtgccctcaaagcaatctgtctctgaagtactggctatcttctgagcgtgtgccagaagatccagctttgttgaaaagcgaagccgttagtcccttaatacaaaggatcagggatagcagaaatgaaagtataatggaagcagctggaggattccaggtccactttcacccaagtaatggagacggaaggttcatcgaaacttcttcagctgcagatctagaagtcattagctattctagcaaagtatctgtcacagaaaggtgcttcataaaggtctgcactgtgctcttttgacctgtgtcttcaagcatgtgctgtcataacagattaaagatgactgaaaattatctgccactcattgcgtgaaaggtgggatctgtagacctccctcttgaatttgggagggttctgtgactgctgtgaccaatgaatatggcagaagtgacgctttgccaacttctgggtccaggctatacgagacaggcagttccactcactgtctcttagatccatgtaaaaagttcatctaccctgctggaaaaaccatgtagagaggccctgagactacattgggtgggagaggggctcagctgcaccatcttccaactgtccccatcaagatgacagaaatataaatgaagccttcttgaactccagaccatccatgctacaagctaaatgccaccaagcgaccccagttaataccatgtggagcaaaaatatcacttaaccaagcactgcctgagtttctgaccccacagaattctgaccccatacaaataaaataatttttgtaattttttataattcgtcatgtaatagataaatggaacagccttcttccagtcttttaaatagctgcaagaaatcttattcaagcagaaggaagtttctactttgttcatacagtctcaagacatccctggagcctttcaagggaaatttgggcagaagtaggtagagaggtaaagctattatgtaacattacttaacatgattaaaaccaccttaatgtctcccatcctcaaaggctgccagtgaattggaaattaatggattaaatgaggacagagaaactagtatttgtgcatatgcactgtgccaggtatttaacgtatcttagctcatgtggtcttcgaaacaaccccatattgtagtatcaggctcacacgggtaactaactagtgcaaagacacaaggctcacaaactgctacttgaccctagagctctttgactccgattcccatgtacgtgccccaataccatgttgactcccaaggtgtaaatcttcaggtatacaaactattaaaatgtgaattttcatttatacgcaatttttgcttatgatatgttttttgtcacttgcataataatagatatgtaactttaaatcagcaatattatactggctatcaaccagtttcatgtaaatttttctaacagaaagaatgtagcattgaaatgtgtacatttttgtccaagtacacctggcaattgaaagaaaaaatccaagccacttggatgcttgattttgtgatttttttttatacacttccttataagaattttttttaggtattgaatttgcaactacaaaacctgattttcctcccggttctgtccctttctagtaatgagacattggacaagtcacttcacttcccagagctttagtttcctcactagttagtggaggccaagagttagctctaagagtgtgagaatt

SEQ ID NO: 7370 - protein, 53 aa, Homo sapiens
MEAAGGFQVHFHPSNGDGRFIETSSAADLEVISYSSKVSVTERCFIKVCTVLF

SEQ ID NO: 7371 - DNA, 643 bp, Homo sapiens
gaagccgcccgtttcctgccgagcggcgcgacggcacctgagcgactgcggcggcggcggcggcggcggcggcgcctcggagcgggcggcccgggctgtagtgccggcgccgccgcgtcttcccggtctcctttcccggccgcacagggtagattttcgttccgtcacccaggctggagtgcagtggtgtgaccttggcttgctgcaaccctttgcctcctgggttcaagtgattctcattgcctcagcctcctaagtagctgggattacaggttttataggatcacattgacaaaagtaccatggagttttatgagtcagcatattttattgttcttattccttcaatagttattacagtaattttcctcttcttctggcttttcatgaaagaaacattatatgatgaagttcttgcaaaacagaaaagagaacaaaagcttattcctaccaaaacagataaaaagaaagcagaaaagaaaaagaataaaaagaaagaaatccagaatggaaacctccatgaatccgactctgagagtgtacctcgagactttaaattatcagatgctttggcagtagaagatgatcaagttgcacctgttccattgaatgtcgttgaaacttcaagtagtgttagggaaag

SEQ ID NO: 7372 - protein, 112 aa, Homo sapiens
MEFYESAYFIVLIPSIVITVIFLFFWLFMKETLYDEVLAKQKREQKLIPTKTDKKKAEKKKNKKKEIQNGNLHESDSESVPRDFKLSDALAVEDDQVAPVPLNVVETSSSVR

SEQ ID NO: 7373 - DNA, 4909 bp, Homo sapiens
gccgcccgtttcctgccgagcggcgcgacggcacctgagcgactgcggcggcggcggcggcggcggcggcgcctcggagcgggcggcccgggctgtagtgccggcgccgccgcgtcttcccggtctcctttcccggccgcacagggtagattttcgttccgtcacccaggctggagtgcagtggtgtgaccttggcttgctgcaaccctttgcctcctgggttcaagtgattctcattgcctcagcctcctaagtagctgggattacaggttttataggatcacattgacaaaagtaccatggagttttatgagtcagcatattttattgttcttattccttcaatagttattacagtaattttcctcttcttctggcttttcatgaaagaaacattatatgatgaagttcttgcaaaacagaaaagagaacaaaagcttattcctaccaaaacagataaaaagaaagcagaaaagaaaaagaataaaaagaaagaaatccagaatggaaacctccatgaatccgactctgagagtgtacctcgagactttaaattatcagatgctttggcagtagaagatgatcaagttgcacctgttccattgaatgtcgttgaaacttcaagtagtgttagggaaagaaaaaagaaggaaaagaaacaaaagcctgtgcttgaagagcaggtcatcaaagaaagtgacgcatcaaagattcctggcaaaaaagtagaacctgtcccagttactaaacagcccacccctccctctgaagcagctgcctcgaagaagaaaccagggcagaagaagtctaaaaatggaagcgatgaccaggataaaaaggtggaaactctcatggtaccatcaaaaaggcaagaagcattgcccctccaccaagagactaaacaagaaagtggatcagggaagaagaaagcttcatcaaagaaacaaaagacagaaaatgtcttcgtagatgaaccccttattcatgcaactacttatattcctttgatggataatgctgactcaagtcctgtggtagataagagagaggttattgatttgcttaaacctgaccaagtagaagggatccagaaatctgggactaaaaaactgaagaccgaaactgacaaagaaaatgctgaagtgaagtttaaagattttcttctgtccttgaagactatgatgttttctgaagatgaggctctttgtgttgtagacttgctaaaggagaagtctggtgtaatacaagatgctttaaagaagtcaagtaagggagaattgactacgcttatacatcagcttcaagaaaaggacaagttactcgctgctgtgaaggaagatgctgctgctacaaaggatcggtgtaagcagttaacccaggaaatgatgacagagaaagaaagaagcaatgtggttataacaaggatgaaagatcgaattggaacattagaaaaggaacataatgtatttcaaaacaaaatacatgtcagttatcaagagactcaacagatgcagatgaagtttcagcaagttcgtgagcagatggaggcagagatagctcacttgaagcaggaaaatggtatactgagagatgcagtcagcaacactacaaatcaactggaaagcaagcagtctgcagaactaaataaactacgccaggattatgctaggttggtgaatgagctgactgagaaaacaggaaagctacagcaagaggaagtccaaaagaagaatgctgagcaagcagctactcagttgaaggttcaactacaagaagctgagagaaggtgggaagaagttcagagctacatcaggaagagaacagcggaacatgaggcagcacagcaagatttacagagtaaatttgtggccaaagaaaatgaagtacagagtctgcatagtaagcttacagataccttggtatcaaaacaacagttggagcaaagactaatgcagttaatggaatcagagcagaaaagggtgaacaaagaagagtctctacaaatgcaggttcaggatattttggagcagaatgaggctttgaaagctcaaattcagcagttccattcccagatagcagcccagacctccgcttcagttctagcagaagaattacataaagtgattgcagaaaaggataagcagataaaacagactgaagattctttagcaagtgaacgtgatcgtttaacaagtaaagaagaggaacttaaggatatacagaatatgaatttcttattaaaagctgaagtgcagaaattacaggccctggcaaatgagcaggctgctgctgcacatgaattggagaagatgcaacaaagtgtttatgttaaagatgataaaataagattgctggaagagcaactacaacatgaaatttcaaacaaaatggaagaatttaagattctaaatgaccaaaacaaagcattaaaatcagaagttcagaagctacagactcttgtttctgaacagcctaataaggatgttgtggaacaaatggaaaaatgcattcaagaaaaagatgagaagttaaagactgtggaagaattacttgaaactggacttattcaggtggcaactaaagaagaggagctgaatgcaataagaacagaaaattcatctctgacaaaagaagttcaagacttaaaagctaagcaaaatgatcaggtttcttttgcctctctagttgaagaacttaagaaagtgatccatgagaaagatggaaagatcaagtctgtagaagagcttctggaggcagaacttctcaaagttgctaacaaggagaaaactgttcaggatttgaaacaggaaataaaggctctaaaagaagaaataggaaatgtccagcttgaaaaggctcaacagttatctatcacttccaaagttcaggagcttcagaacttattaaaaggaaaagaggaacagatgaataccatgaaggctgttttggaagagaaagagaaagacctagccaatacagggaagtggttacaggatcttcaagaagaaaatgaatctttaaaagcacatgttcaggaagtagcacaacataacttgaaagaggcctcttctgcatcacagtttgaagaacttgagattgtgttgaaagaaaaggaaaatgaattgaagaggttagaagccatgctaaaagagagggagagtgatctttctagcaaaacacagctgttacaggatgtacaagatgaaaacaaattgtttaagtcccaaattgagcagcttaaacaacaaaactaccaacaggcatcttcttttccccctcatgaagaattattaaaagtaatttcagaaagagagaaagaaataagtggtctctggaatgagttagattctttgaaggatgcagttgaacaccagaggaagaaaaacaatgaccttcgggagaaaaactgggaagcaatggaagcattggcatcaactgaaaaaatgctgcaggacaaagtgaacaagacttccaaggaaaggcagcaacaggtggaagctgttgagttggaggctaaagaagttctcaaaaaattatttccaaaggtgtctgtcccttctaatttgagttatggtgaatggttgcatggatttgaaaaaaaggcaaaagaatgtatggctggaacttcagggtcagaggaggttaaggttctagagcacaagttgaaagaagctgatgaaatgcacacattgttacagctagagtgtgaaaaatacaaatccgtccttgcagaaacagaaggaattttacagaagctacagagaagtgttgagcaagaagaaaataaatggaaagttaaggtcgatgaatcacacaagactattaaacagatgcagtcatcatttacatcttcagaacaagagctagagcgattaagaagcgaaaataaggatattgaaaatctgagaagagaacgagaacatttggaaatggaactagaaaaggcagagatggaacgatctacctatgttacagaagtcagagagctgaaagatctgttgactgaattgcagaaaaaacttgatgattcatattctgaagcagtaagacagaatgaagagctaaatttgttgaaggcacagttaaatgaaacactcacaaaacttagaactgaacaaaatgaaagacagaaggtagctggtgatttgcataaggctcaacagtcactggagcttatccagtcaaaaatagtaaaagctgctggagacactactgttattgaaaatagtgatgtttccccagaaacggagtcttctgagaaggagacaatgtctgtaagtctaaatcagactgtaacacagttacagcagttgcttcaggcggtaaaccaacagctcacaaaggagaaagagcactaccaggtgttagagtgatcatcctctggcctaccttgacacatgctctccttcaaaatgctaattcagagtgaagtaattgggaaactgttcatttgaggataaaaaaggcattgtattatattttgccaaattaaagccttatttatgttttcaccctttctactttgtcagaaacactgaacagagttttgtcttttctaatccttgttagactactgatttaaagaaggaaaaaaaaaagccaactctgtagacaccttcagagtttagttttataataaaaactgtttgaataattagacctttacattcctgaagataaacatgtaatcttttatcttattttgctcaataaaattgttcagaagatcaaagtggtaaagacaatgtaaaatttaacattttaatactgatgttgtacactgttttacttaacattttgggaagtaactgcctctgacttcaactcaagaaaacacttttttgttgctaatgtaatcggtttttgtaatggcgtcagcaaataaaaggatgcttattattcaaacttg

SEQ ID NO: 7374 - protein, 1357 aa, Homo sapiens; identical to SEQ ID NO: 1016

SEQ ID NO: 7375 - DNA, 4548 bp, Homo sapiens
tcctgccgagcggcgcgacggcacctgagcgactgcggcggcggcggcggcggcggcggcgcctcggagcgggcggcccgggctgtagtgccggcgccgccgcgtcttcccggtctcctttcccggccgcacagggttttataggatcacattgacaaaagtaccatggagttttatgagtcagcatattttattgttcttattccttcaatagttattacagtaattttcctcttcttctggcttttcatgaaagaaacattatatgatgaagttcttgcaaaacagaaaagagaacaaaagcttattcctaccaaaacagataaaaagaaagcagaaaagaaaaagaataaaaagaaagaaatccagaatggaaacctccatgaatccgactctgagagtgtacctcgagactttaaattatcagatgctttggcagtagaagatgatcaagttgcacctgttccattgaatgtcgttgaaacttcaagtagtgttagggaaagaaaaaagaaggaaaagaaacaaaagcctgtgcttgaagagcaggtcatcaaagaaagtgacgcatcaaagattcctggcaaaaaagtagaacctgtcccagttactaaacagcccacccctccctctgaagcagctgcctcgaagaagaaaccagggcagaagaagtctaaaaatggaagcgatgaccaggataaaaaggtggaaactctcatggtaccatcaaaaaggcaagaagcattgcccctccaccaagagactaaacaagaaagtggatcagggaagaagaaagcttcatcaaagaaacaaaagacagaaaatgtcttcgtagatgaaccccttattcatgcaactacttatattcctttgatggataatgctgactcaagtcctgtggtagataagagagaggttattgatttgcttaaacctgaccaagtagaagggatccagaaatctgggactaaaaaactgaagaccgaaactgacaaagaaaatgctgaagtgaagtttaaagattttcttctgtccttgaagactatgatgttttctgaagatgaggctctttgtgttgtagacttgctaaaggagaagtctggtgtaatacaagatgctttaaagaagtcaagtaagggagaattgactacgcttatacatcagcttcaagaaaaggacaagttactcgctgctgtgaaggaagatgctgctgctacaaaggatcggtgtaagcagttaacccaggaaatgatgacagagaaagaaagaagcaatgtggttataacaaggatgaaagatcgaattggaacattagaaaaggaacataatgtatttcaaaacaaaatacatgtcagttatcaagagactcaacagatgcagatgaagtttcagcaagttcgtgagcagatggaggcagagatagctcacttgaagcaggaaaatggtatactgagagatgcagtcagcaacactacaaatcaactggaaagcaagcagtctgcagaactaaataaactacgccaggattatgctaggttggtgaatgagctgactgagaaaacaggaaagctacagcaagaggaagtccaaaagaagaatgctgagcaagcagctactcagttgaaggttcaactacaagaagctgagagaaggtgggaagaagttcagagctacatcaggaagagaacagcggaacatgaggcagcacagcaagatttacagagtaaatttgtggccaaagaaaatgaagtacagagtctgcatagtaagcttacagataccttggtatcaaaacaacagttggagcaaagactaatgcagttaatggaatcagagcagaaaagggtgaacaaagaagagtctctacaaatgcaggttcaggatattttggagcagaatgaggctttgaaagctcaaattcagcagttccattcccagatagcagcccagacctccgcttcagttctagcagaagaattacataaagtgattgcagaaaaggataagcagataaaacagactgaagattctttagcaagtgaacgtgatcgtttaacaagtaaagaagaggaacttaaggatatacagaatatgaatttcttattaaaagctgaagtgcagaaattacaggccctggcaaatgagcaggctgctgctgcacatgaattggagaagatgcaacaaagtgtttatgttaaagatgataaaataagattgctggaagagcaactacaacatgaaatttcaaacaaaatggaagaatttaagattctaaatgaccaaaacaaagcattaaaatcagaagttcagaagctacagactcttgtttctgaacagcctaataaggatgttgtggaacaaatggaaaaatgcattcaagaaaaagatgagaagttaaagactgtggaagaattacttgaaactggacttattcaggtggcaactaaagaagaggagctgaatgcaataagaacagaaaattcatctctgacaaaagaagttcaagacttaaaagctaagcaaaatgatcaggtttcttttgcctctctagttgaagaacttaagaaagtgatccatgagaaagatggaaagatcaagtctgtagaagagcttctggaggcagaacttctcaaagttgctaacaaggagaaaactgttcaggatttgaaacaggaaataaaggctctaaaagaagaaataggaaatgtccagcttgaaaaggctcaacagttatctatcacttccaaagttcaggagcttcagaacttattaaaaggaaaagaggaacagatgaataccatgaaggctgttttggaagagaaagagaaagacctagccaatacagggaagtggttacaggatcttcaagaagaaaatgaatctttaaaagcacatgttcaggaagtagcacaacataacttgaaagaggcctcttctgcatcacagtttgaagaacttgagattgtgttgaaagaaaaggaaaatgaattgaagaggttagaagccatgctaaaagagagggagagtgatctttctagcaaaacacagctgttacaggatgtacaagatgaaaacaaattgtttaagtcccaaattgagcagcttaaacaacaaaactaccaacaggcatcttcttttccccctcatgaagaattattaaaagtaatttcagaaagagagaaagaaataagtggtctctggaatgagttagattctttgaaggatgcagttgaacaccagaggaagaaaaacaatgaaaggcagcaacaggtggaagctgttgagttggaggctaaagaagttctcaaaaaattatttccaaaggtgtctgtcccttctaatttgagttatggtgaatggttgcatggatttgaaaaaaaggcaaaagaatgtatggctggaacttcagggtcagaggaggttaaggttctagagcacaagttgaaagaagctgatgaaatgcacacattgttacagctagagtgtgaaaaatacaaatccgtccttgcagaaacagaaggaattttacagaagctacagagaagtgttgagcaagaagaaaataaatggaaagttaaggtcgatgaatcacacaagactattaaacagatgcagtcatcatttacatcttcagaacaagagctagagcgattaagaagcgaaaataaggatattgaaaatctgagaagagaacgagaacatttggaaatggaactagaaaaggcagagatggaacgatctacctatgttacagaagtcagagagttgaaggcacagttaaatgaaacactcacaaaacttagaactgaacaaaatgaaagacagaaggtagctggtgatttgcataaggctcaacagtcactggagcttatccagtcaaaaatagtaaaagctgctggagacactactgttattgaaaatagtgatgtttccccagaaacggagtcttctgagaaggagacaatgtctgtaagtctaaatcagactgtaacacagttacagcagttgcttcaggcggtaaaccaacagctcacaaaggagaaagagcactaccaggtgttagagtgaagtaattgggaaactgttcatttgaggataaaaaaggcattgtattatattttgccaaattaaagccttatttatgttttcaccctttctactttgtcagaaacactgaacagagttttgtcttttctaatccttgttagactactgatttaaagaaggaaaaaaaaaagccaactctgtagacaccttcagagtttagttttataataaaaactgtttgaataattagacctttacattcctgaagataaacatgtaatcttttatcttattttgctcaataaaattgttcagaagatcaaagtggtaaagacaatgtaaaatttaacattttaatactgatgttgtacactgttttacttaacattttgggaagtaactgcctctgacttcaactcaagaaaacacttttttgttgctaatgtaatcggtttttgtaatggcgtcagcaaataaaaggatgcttattattcaaacttg

SEQ ID NO: 7376 - protein, 1300 aa, Homo sapiens
MEFYESAYFIVLIPSIVITVIFLFFWLFMKETLYDEVLAKQKREQKLIPTKTDKKKAEKKKNKKKEIQNGNLHESDSESVPRDFKLSDALAVEDDQVAPVPLNVVETSSSVRERKKKEKKQKPVLEEQVIKESDASKIPGKKVEPVPVTKQPTPPSEAAASKKKPGQKKSKNGSDDQDKKVETLMVPSKRQEALPLHQETKQESGSGKKKASSKKQKTENVFVDEPLIHATTYIPLMDNADSSPVVDKREVIDLLKPDQVEGIQKSGTKKLKTETDKENAEVKFKDFLLSLKTMMFSEDEALCVVDLLKEKSGVIQDALKKSSKGELTTLIHQLQEKDKLLAAVKEDAAATKDRCKQLTQEMMTEKERSNVVITRMKDRIGTLEKEHNVFQNKIHVSYQETQQMQMKFQQVREQMEAEIAHLKQENGILRDAVSNTTNQLESKQSAELNKLRQDYARLVNELTEKTGKLQQEEVQKKNAEQAATQLKVQLQEAERRWEEVQSYIRKRTAEHEAAQQDLQSKFVAKENEVQSLHSKLTDTLVSKQQLEQRLMQLMESEQKRVNKEESLQMQVQDILEQNEALKAQIQQFHSQIAAQTSASVLAEELHKVIAEKDKQIKQTEDSLASERDRLTSKEEELKDIQNMNFLLKAEVQKLQALANEQAAAAHELEKMQQSVYVKDDKIRLLEEQLQHEISNKMEEFKILNDQNKALKSEVQKLQTLVSEQPNKDVVEQMEKCIQEKDEKLKTVEELLETGLIQVATKEEELNAIRTENSSLTKEVQDLKAKQNDQVSFASLVEELKKVIHEKDGKIKSVEELLEAELLKVANKEKTVQDLKQEIKALKEEIGNVQLEKAQQLSITSKVQELQNLLKGKEEQMNTMKAVLEEKEKDLANTGKWLQDLQEENESLKAHVQEVAQHNLKEASSASQFEELEIVLKEKENELKRLEAMLKERESDLSSKTQLLQDVQDENKLFKSQIEQLKQQNYQQASSFPPHEELLKVISEREKEISGLWNELDSLKDAVEHQRKKNNERQQQVEAVELEAKEVLKKLFPKVSVPSNLSYGEWLHGFEKKAKECMAGTSGSEEVKVLEHKLKEADEMHTLLQLECEKYKSVLAETEGILQKLQRSVEQEENKWKVKVDESHKTIKQMQSSFTSSEQELERLRSENKDIENLRREREHLEMELEKAEMERSTYVTEVRELKAQLNETLTKLRTEQNERQKVAGDLHKAQQSLELIQSKIVKAAGDTTVIENSDVSPETESSEKETMSVSLNQTVTQLQQLLQAVNQQLTKEKEHYQVLE

SEQ ID NO: 7377 - DNA, 4719 bp, Homo sapiens
tcctgccgagcggcgcgacggcacctgagcgactgcggcggcggcggcggcggcggcggcgcctcggagcgggcggcccgggctgtagtgccggcgccgccgcgtcttcccggtctcctttcccggccgcacagggttttataggatcacattgacaaaagtaccatggagttttatgagtcagcatattttattgttcttattccttcaatagttattacagtaattttcctcttcttctggcttttcatgaaagaaacattatatgatgaagttcttgcaaaacagaaaagagaacaaaagcttattcctaccaaaacagataaaaagaaagcagaaaagaaaaagaataaaaagaaagaaatccagaatggaaacctccatgaatccgactctgagagtgtacctcgagactttaaattatcagatgctttggcagtagaagatgatcaagttgcacctgttccattgaatgtcgttgaaacttcaagtagtgttagggaaagaaaaaagaaggaaaagaaacaaaagcctgtgcttgaagagcaggtcatcaaagaaagtgacgcatcaaagattcctggcaaaaaagtagaacctgtcccagttactaaacagcccacccctccctctgaagcagctgcctcgaagaagaaaccagggcagaagaagtctaaaaatggaagcgatgaccaggataaaaaggtggaaactctcatggtaccatcaaaaaggcaagaagcattgcccctccaccaagagactaaacaagaaagtggatcagggaagaagaaagcttcatcaaagaaacaaaagacagaaaatgtcttcgtagatgaaccccttattcatgcaactacttatattcctttgatggataatgctgactcaagtcctgtggtagataagagagaggttattgatttgcttaaacctgaccaagtagaagggatccagaaatctgggactaaaaaactgaagaccgaaactgacaaagaaaatgctgaagtgaagtttaaagattttcttctgtccttgaagactatgatgttttctgaagatgaggctctttgtgttgtagacttgctaaaggagaagtctggtgtaatacaagatgctttaaagaagtcaagtaagggagaattgactacgcttatacatcagcttcaagaaaaggacaagttactcgctgctgtgaaggaagatgctgctgctacaaaggatcggtgtaagcagttaacccaggaaatgatgacagagaaagaaagaagcaatgtggttataacaaggatgaaagatcgaattggaacattagaaaaggaacataatgtatttcaaaacaaaatacatgtcagttatcaagagactcaacagatgcagatgaagtttcagcaagttcgtgagcagatggaggcagagatagctcacttgaagcaggaaaatggtatactgagagatgcagtcagcaacactacaaatcaactggaaagcaagcagtctgcagaactaaataaactacgccaggattatgctaggttggtgaatgagctgactgagaaaacaggaaagctacagcaagaggaagtccaaaagaagaatgctgagcaagcagctactcagttgaaggttcaactacaagaagctgagagaaggtgggaagaagttcagagctacatcaggaagagaacagcggaacatgaggcagcacagcaagatttacagagtaaatttgtggccaaagaaaatgaagtacagagtctgcatagtaagcttacagataccttggtatcaaaacaacagttggagcaaagactaatgcagttaatggaatcagagcagaaaagggtgaacaaagaagagtctctacaaatgcaggttcaggatattttggagcagaatgaggctttgaaagctcaaattcagcagttccattcccagatagcagcccagacctccgcttcagttctagcagaagaattacataaagtgattgcagaaaaggataagcagataaaacagactgaagattctttagcaagtgaacgtgatcgtttaacaagtaaagaagaggaacttaaggatatacagaatatgaatttcttattaaaagctgaagtgcagaaattacaggccctggcaaatgagcaggctgctgctgcacatgaattggagaagatgcaacaaagtgtttatgttaaagatgataaaataagattgctggaagagcaactacaacatgaaatttcaaacaaaatggaagaatttaagattctaaatgaccaaaacaaagcattaaaatcagaagttcagaagctacagactcttgtttctgaacagcctaataaggatgttgtggaacaaatggaaaaatgcattcaagaaaaagatgagaagttaaagactgtggaagaattacttgaaactggacttattcaggtggcaactaaagaagaggagctgaatgcaataagaacagaaaattcatctctgacaaaagaagttcaagacttaaaagctaagcaaaatgatcaggtttcttttgcctctctagttgaagaacttaagaaagtgatccatgagaaagatggaaagatcaagtctgtagaagagcttctggaggcagaacttctcaaagttgctaacaaggagaaaactgttcaggatttgaaacaggaaataaaggctctaaaagaagaaataggaaatgtccagcttgaaaaggctcaacagttatctatcacttccaaagttcaggagcttcagaacttattaaaaggaaaagaggaacagatgaataccatgaaggctgttttggaagagaaagagaaagacctagccaatacagggaagtggttacaggatcttcaagaagaaaatgaatctttaaaagcacatgttcaggaagtagcacaacataacttgaaagaggcctcttctgcatcacagtttgaagaacttgagattgtgttgaaagaaaaggaaaatgaattgaagaggttagaagccatgctaaaagagagggagagtgatctttctagcaaaacacagctgttacaggatgtacaagatgaaaacaaattgtttaagtcccaaattgagcagcttaaacaacaaaactaccaacaggcatcttcttttccccctcatgaagaattattaaaagtaatttcagaaagagagaaagaaataagtggtctctggaatgagttagattctttgaaggatgcagttgaacaccagaggaagaaaaacaatgaccttcgggagaaaaactgggaagcaatggaagcattggcatcaactgaaaaaatgctgcaggacaaagtgaacaagacttccaaggaaaggcagcaacaggtggaagctgttgagttggaggctaaagaagttctcaaaaaattatttccaaaggtgtctgtcccttctaatttgagttatggtgaatggttgcatggatttgaaaaaaaggcaaaagaatgtatggctggaacttcagggtcagaggaggttaaggttctagagcacaagttgaaagaagctgatgaaatgcacacattgttacagctagagtgtgaaaaatacaaatccgtccttgcagaaacagaaggaattttacagaagctacagagaagtgttgagcaagaagaaaataaatggaaagttaaggtcgatgaatcacacaagactattaaacagatgcagtcatcatttacatcttcagaacaagagctagagcgattaagaagcgaaaataaggatattgaaaatctgagaagagaacgagaacatttggaaatggaactagaaaaggcagagatggaacgatctacctatgttacagaagtcagagagctgaaagatctgttgactgaattgcagaaaaaacttgatgattcatattctgaagcagtaagacagaatgaagagctaaatttgttgaaggcacagttaaatgaaacactcacaaaacttagaactgaacaaaatgaaagacagaaggtagctggtgatttgcataaggctcaacagtcactggagcttatccagtcaaaaatagtaaaagctgctggagacactactgttattgaaaatagtgatgtttccccagaaacggagtcttctgagaaggagacaatgtctgtaagtctaaatcagactgtaacacagttacagcagttgcttcaggcggtaaaccaacagctcacaaaggagaaagagcactaccaggtgttagagtgaagtaattgggaaactgttcatttgaggataaaaaaggcattgtattatattttgccaaattaaagccttatttatgttttcaccctttctactttgtcagaaacactgaacagagttttgtcttttctaatccttgttagactactgatttaaagaaggaaaaaaaaaagccaactctgtagacaccttcagagtttagttttataataaaaactgtttgaataattagacctttacattcctgaagataaacatgtaatcttttatcttattttgctcaataaaattgttcagaagatcaaagtggtaaagacaatgtaaaatttaacattttaatactgatgttgtacactgttttacttaacattttgggaagtaactgcctctgacttcaactcaagaaaacacttttttgttgctaatgtaatcggtttttgtaatggcgtcagcaaataaaaggatgcttattattcaaacttg

SEQ ID NO: 7378 - protein, 1357 aa, Homo sapiens; identical to SEQ ID NO: 1016

SEQ ID NO: 7379 - DNA, 5484 bp, Homo sapiens
tcctgccgagcggcgcgacggcacctgagcgactgcggcggcggcggcggcggcggcggcgcctcggagcgggcggcccgggctgtagtgccggcgccgccgcgtcttcccggtctcctttcccggccgcacagggttttataggatcacattgacaaaagtaccatggagttttatgagtcagcatattttattgttcttattccttcaatagttattacagtaattttcctcttcttctggcttttcatgaaagaaacattatatgatgaagttcttgcaaaacagaaaagagaacaaaagcttattcctaccaaaacagataaaaagaaagcagaaaagaaaaagaataaaaagaaagaaatccagaatggaaacctccatgaatccgactctgagagtgtacctcgagactttaaattatcagatgctttggcagtagaagatgatcaagttgcacctgttccattgaatgtcgttgaaacttcaagtagtgttagggaaagaaaaaagaaggaaaagaaacaaaagcctgtgcttgaagagcaggtcatcaaagaaagtgacgcatcaaagattcctggcaaaaaagtagaacctgtcccagttactaaacagcccacccctccctctgaagcagctgcctcgaagaagaaaccagggcagaagaagtctaaaaatggaagcgatgaccaggataaaaaggtggaaactctcatggtaccatcaaaaaggcaagaagcattgcccctccaccaagagactaaacaagaaagtggatcagggaagaagaaagcttcatcaaagaaacaaaagacagaaaatgtcttcgtagatgaaccccttattcatgcaactacttatattcctttgatggataatgctgactcaagtcctgtggtagataagagagaggttattgatttgcttaaacctgaccaagtagaagggatccagaaatctgggactaaaaaactgaagaccgaaactgacaaagaaaatgctgaagtgaagtttaaagattttcttctgtccttgaagactatgatgttttctgaagatgaggctctttgtgttgtagacttgctaaaggagaagtctggtgtaatacaagatgctttaaagaagtcaagtaagggagaattgactacgcttatacatcagcttcaagaaaaggacaagttactcgctgctgtgaaggaagatgctgctgctacaaaggatcggtgtaagcagttaacccaggaaatgatgacagagaaagaaagaagcaatgtggttataacaaggatgaaagatcgaattggaacattagaaaaggaacataatgtatttcaaaacaaaatacatgtcagttatcaagagactcaacagatgcagatgaagtttcagcaagttcgtgagcagatggaggcagagatagctcacttgaagcaggaaaatggtatactgagagatgcagtcagcaacactacaaatcaactggaaagcaagcagtctgcagaactaaataaactacgccaggattatgctaggttggtgaatgagctgactgagaaaacaggaaagctacagcaagaggaagtccaaaagaagaatgctgagcaagcagctactcagttgaaggttcaactacaagaagctgagagaaggtgggaagaagttcagagctacatcaggaagagaacagcggaacatgaggcagcacagcaagatttacagagtaaatttgtggccaaagaaaatgaagtacagagtctgcatagtaagcttacagataccttggtatcaaaacaacagttggagcaaagactaatgcagttaatggaatcagagcagaaaagggtgaacaaagaagagtctctacaaatgcaggttcaggatattttggagcagaatgaggctttgaaagctcaaattcagcagttccattcccagatagcagcccagacctccgcttcagttctagcagaagaattacataaagtgattgcagaaaaggataagcagataaaacagactgaagattctttagcaagtgaacgtgatcgtttaacaagtaaagaagaggaacttaaggatatacagaatatgaatttcttattaaaagctgaagtgcagaaattacaggccctggcaaatgagcaggctgctgctgcacatgaattggagaagatgcaacaaagtgtttatgttaaagatgataaaataagattgctggaagagcaactacaacatgaaatttcaaacaaaatggaagaatttaagattctaaatgaccaaaacaaagcattaaaatcagaagttcagaagctacagactcttgtttctgaacagcctaataaggatgttgtggaacaaatggaaaaatgcattcaagaaaaagatgagaagttaaagactgtggaagaattacttgaaactggacttattcaggtggcaactaaagaagaggagctgaatgcaataagaacagaaaattcatctctgacaaaagaagttcaagacttaaaagctaagcaaaatgatcaggtttcttttgcctctctagttgaagaacttaagaaagtgatccatgagaaagatggaaagatcaagtctgtagaagagcttctggaggcagaacttctcaaagttgctaacaaggagaaaactgttcaggatttgaaacaggaaataaaggctctaaaagaagaaataggaaatgtccagcttgaaaaggctcaacagttatctatcacttccaaagttcaggagcttcagaacttattaaaaggaaaagaggaacagatgaataccatgaaggctgttttggaagagaaagagaaagacctagccaatacagggaagtggttacaggatcttcaagaagaaaatgaatctttaaaagcacatgttcaggaagtagcacaacataacttgaaagaggcctcttctgcatcacagtttgaagaacttgagattgtgttgaaagaaaaggaaaatgaattgaagaggttagaagccatgctaaaagagagggagagtgatctttctagcaaaacacagctgttacaggatgtacaagatgaaaacaaattgtttaagtcccaaattgagcagcttaaacaacaaaactaccaacaggcatcttcttttccccctcatgaagaattattaaaagtaatttcagaaagagagaaagaaataagtggtctctggaatgagttagattctttgaaggatgcagttgaacaccagaggaagaaaaacaatgaaaggcagcaacaggtggaagctgttgagttggaggctaaagaagttctcaaaaaattatttccaaaggtgtctgtcccttctaatttgagttatggtgaatggttgcatggatttgaaaaaaaggcaaaagaatgtatggctggaacttcagggtcagaggaggttaaggttctagagcacaagttgaaagaagctgatgaaatgcacacattgttacagctagagtgtgaaaaatacaaatccgtccttgcagaaacagaaggaattttacagaagctacagagaagtgttgagcaagaagaaaataaatggaaagttaaggtcgatgaatcacacaagactattaaacagatgcagtcatcatttacatcttcagaacaagagctagagcgattaagaagcgaaaataaggatattgaaaatctgagaagagaacgagaacatttggaaatggaactagaaaaggcagagatggaacgatctacctatgttacagaagtcagagagttgaaggcacagttaaatgaaacactcacaaaacttagaactgaacaaaatgaaagacagaaggtagctggtgatttgcataaggctcaacagtcactggagcttatccagtcaaaaatagtaaaagctgctggagacactactgttattgaaaatagtgatgtttccccagaaacggagtcttctgagaaggagacaatgtctgtaagtctaaatcagactgtaacacagttacagcagttgcttcaggcggtaaaccaacagctcacaaaggagaaagagcactaccaggtgttagagtgaagtaattgggaaactgttcatttgaggataaaaaaggcattgtattatattttgccaaattaaagccttatttatgttttcaccctttctactttgtcagaaacactgaacagagttttgtcttttctaatccttgttagactactgatttaaagaaggaaaaaaaaaagccaactctgtagacaccttcagagtttagttttataataaaaactgtttgaataattagacctttacattcctgaagataaacatgtaatcttttatcttattttgctcaataaaattgttcagaagatcaaagtggtaaagacaatgtaaaatttaacattttaatactgatgttgtacactgttttacttaacattttgggaagtaactgcctctgacttcaactcaagaaaacacttttttgttgctaatgtaatcggtttttgtaatggcgtcagcaaataaaaggatgcttattattcaaacttgacttgttctaatttttattgagctttaacagatttcattagtagtacagatcattgtaatttagaatacagctattaattggcaaccattcaacaagataggtttatgtagcctctgtaacctttctaactgatgctctgggtcctcttcagtttggtccaatgtaaagtgccccaggagtgctggggtttcagaaaggacagagcaagcatttaggatttcagactaaacacccacacttcaggtagaggagctctatttttaccattactatttttttttgaagtaataataattaactgttagttttctttttcaggcacggttacacagtttacatgtgttatcttttttgttgttgttgttgttgttactgtttttttgatacagagtctcactctgttgtccacgcaggagtgcattggcactatctgggcttactgcaacctccacctcccggttcaagcaattctcatgtagctgggattacaggcgcctgccgccatgcctggctaatttttgtatttttagtagaaagagtttttcaccttgttggccaggctggtctcgaactgctgacctcaagtgatccacccatcccaaagtgctcggattaccggtgtgagccactgtgcccagccaatgaaagtttttttaataatttgttaaaaacacttcagatgctaaataaccactgagaaatatcttgtgccattgagtactaaagtacccattaggctgcactgtggtcatcttgttatttttgtgcacataacagtcatgcttctgtcatggggcctctgcattttctgttctctgggcttggaactctcctctggtgtgtcagctttggcttgctccttcactatgttgaaatctgcttaaatgtcacccttctaattaagtctttcctgactgtccgctatccttctgccc

SEQ ID NO: 7380 - protein, 1300 aa, Homo sapiens; identical to SEQ ID NO: 7376

SEQ ID NO: 7381 - DNA, 5655 bp, Homo sapiens
tcctgccgagcggcgcgacggcacctgagcgactgcggcggcggcggcggcggcggcggcgcctcggagcgggcggcccgggctgtagtgccggcgccgccgcgtcttcccggtctcctttcccggccgcacagggttttataggatcacattgacaaaagtaccatggagttttatgagtcagcatattttattgttcttattccttcaatagttattacagtaattttcctcttcttctggcttttcatgaaagaaacattatatgatgaagttcttgcaaaacagaaaagagaacaaaagcttattcctaccaaaacagataaaaagaaagcagaaaagaaaaagaataaaaagaaagaaatccagaatggaaacctccatgaatccgactctgagagtgtacctcgagactttaaattatcagatgctttggcagtagaagatgatcaagttgcacctgttccattgaatgtcgttgaaacttcaagtagtgttagggaaagaaaaaagaaggaaaagaaacaaaagcctgtgcttgaagagcaggtcatcaaagaaagtgacgcatcaaagattcctggcaaaaaagtagaacctgtcccagttactaaacagcccacccctccctctgaagcagctgcctcgaagaagaaaccagggcagaagaagtctaaaaatggaagcgatgaccaggataaaaaggtggaaactctcatggtaccatcaaaaaggcaagaagcattgcccctccaccaagagactaaacaagaaagtggatcagggaagaagaaagcttcatcaaagaaacaaaagacagaaaatgtcttcgtagatgaaccccttattcatgcaactacttatattcctttgatggataatgctgactcaagtcctgtggtagataagagagaggttattgatttgcttaaacctgaccaagtagaagggatccagaaatctgggactaaaaaactgaagaccgaaactgacaaagaaaatgctgaagtgaagtttaaagattttcttctgtccttgaagactatgatgttttctgaagatgaggctctttgtgttgtagacttgctaaaggagaagtctggtgtaatacaagatgctttaaagaagtcaagtaagggagaattgactacgcttatacatcagcttcaagaaaaggacaagttactcgctgctgtgaaggaagatgctgctgctacaaaggatcggtgtaagcagttaacccaggaaatgatgacagagaaagaaagaagcaatgtggttataacaaggatgaaagatcgaattggaacattagaaaaggaacataatgtatttcaaaacaaaatacatgtcagttatcaagagactcaacagatgcagatgaagtttcagcaagttcgtgagcagatggaggcagagatagctcacttgaagcaggaaaatggtatactgagagatgcagtcagcaacactacaaatcaactggaaagcaagcagtctgcagaactaaataaactacgccaggattatgctaggttggtgaatgagctgactgagaaaacaggaaagctacagcaagaggaagtccaaaagaagaatgctgagcaagcagctactcagttgaaggttcaactacaagaagctgagagaaggtgggaagaagttcagagctacatcaggaagagaacagcggaacatgaggcagcacagcaagatttacagagtaaatttgtggccaaagaaaatgaagtacagagtctgcatagtaagcttacagataccttggtatcaaaacaacagttggagcaaagactaatgcagttaatggaatcagagcagaaaagggtgaacaaagaagagtctctacaaatgcaggttcaggatattttggagcagaatgaggctttgaaagctcaaattcagcagttccattcccagatagcagcccagacctccgcttcagttctagcagaagaattacataaagtgattgcagaaaaggataagcagataaaacagactgaagattctttagcaagtgaacgtgatcgtttaacaagtaaagaagaggaacttaaggatatacagaatatgaatttcttattaaaagctgaagtgcagaaattacaggccctggcaaatgagcaggctgctgctgcacatgaattggagaagatgcaacaaagtgtttatgttaaagatgataaaataagattgctggaagagcaactacaacatgaaatttcaaacaaaatggaagaatttaagattctaaatgaccaaaacaaagcattaaaatcagaagttcagaagctacagactcttgtttctgaacagcctaataaggatgttgtggaacaaatggaaaaatgcattcaagaaaaagatgagaagttaaagactgtggaagaattacttgaaactggacttattcaggtggcaactaaagaagaggagctgaatgcaataagaacagaaaattcatctctgacaaaagaagttcaagacttaaaagctaagcaaaatgatcaggtttcttttgcctctctagttgaagaacttaagaaagtgatccatgagaaagatggaaagatcaagtctgtagaagagcttctggaggcagaacttctcaaagttgctaacaaggagaaaactgttcaggatttgaaacaggaaataaaggctctaaaagaagaaataggaaatgtccagcttgaaaaggctcaacagttatctatcacttccaaagttcaggagcttcagaacttattaaaaggaaaagaggaacagatgaataccatgaaggctgttttggaagagaaagagaaagacctagccaatacagggaagtggttacaggatcttcaagaagaaaatgaatctttaaaagcacatgttcaggaagtagcacaacataacttgaaagaggcctcttctgcatcacagtttgaagaacttgagattgtgttgaaagaaaaggaaaatgaattgaagaggttagaagccatgctaaaagagagggagagtgatctttctagcaaaacacagctgttacaggatgtacaagatgaaaacaaattgtttaagtcccaaattgagcagcttaaacaacaaaactaccaacaggcatcttcttttccccctcatgaagaattattaaaagtaatttcagaaagagagaaagaaataagtggtctctggaatgagttagattctttgaaggatgcagttgaacaccagaggaagaaaaacaatgaccttcgggagaaaaactgggaagcaatggaagcattggcatcaactgaaaaaatgctgcaggacaaagtgaacaagacttccaaggaaaggcagcaacaggtggaagctgttgagttggaggctaaagaagttctcaaaaaattatttccaaaggtgtctgtcccttctaatttgagttatggtgaatggttgcatggatttgaaaaaaaggcaaaagaatgtatggctggaacttcagggtcagaggaggttaaggttctagagcacaagttgaaagaagctgatgaaatgcacacattgttacagctagagtgtgaaaaatacaaatccgtccttgcagaaacagaaggaattttacagaagctacagagaagtgttgagcaagaagaaaataaatggaaagttaaggtcgatgaatcacacaagactattaaacagatgcagtcatcatttacatcttcagaacaagagctagagcgattaagaagcgaaaataaggatattgaaaatctgagaagagaacgagaacatttggaaatggaactagaaaaggcagagatggaacgatctacctatgttacagaagtcagagagctgaaagatctgttgactgaattgcagaaaaaacttgatgattcatattctgaagcagtaagacagaatgaagagctaaatttgttgaaggcacagttaaatgaaacactcacaaaacttagaactgaacaaaatgaaagacagaaggtagctggtgatttgcataaggctcaacagtcactggagcttatccagtcaaaaatagtaaaagctgctggagacactactgttattgaaaatagtgatgtttccccagaaacggagtcttctgagaaggagacaatgtctgtaagtctaaatcagactgtaacacagttacagcagttgcttcaggcggtaaaccaacagctcacaaaggagaaagagcactaccaggtgttagagtgaagtaattgggaaactgttcatttgaggataaaaaaggcattgtattatattttgccaaattaaagccttatttatgttttcaccctttctactttgtcagaaacactgaacagagttttgtcttttctaatccttgttagactactgatttaaagaaggaaaaaaaaaagccaactctgtagacaccttcagagtttagttttataataaaaactgtttgaataattagacctttacattcctgaagataaacatgtaatcttttatcttattttgctcaataaaattgttcagaagatcaaagtggtaaagacaatgtaaaatttaacattttaatactgatgttgtacactgttttacttaacattttgggaagtaactgcctctgacttcaactcaagaaaacacttttttgttgctaatgtaatcggtttttgtaatggcgtcagcaaataaaaggatgcttattattcaaacttgacttgttctaatttttattgagctttaacagatttcattagtagtacagatcattgtaatttagaatacagctattaattggcaaccattcaacaagataggtttatgtagcctctgtaacctttctaactgatgctctgggtcctcttcagtttggtccaatgtaaagtgccccaggagtgctggggtttcagaaaggacagagcaagcatttaggatttcagactaaacacccacacttcaggtagaggagctctatttttaccattactatttttttttgaagtaataataattaactgttagttttctttttcaggcacggttacacagtttacatgtgttatcttttttgttgttgttgttgttgttactgtttttttgatacagagtctcactctgttgtccacgcaggagtgcattggcactatctgggcttactgcaacctccacctcccggttcaagcaattctcatgtagctgggattacaggcgcctgccgccatgcctggctaatttttgtatttttagtagaaagagtttttcaccttgttggccaggctggtctcgaactgctgacctcaagtgatccacccatcccaaagtgctcggattaccggtgtgagccactgtgcccagccaatgaaagtttttttaataatttgttaaaaacacttcagatgctaaataaccactgagaaatatcttgtgccattgagtactaaagtacccattaggctgcactgtggtcatcttgttatttttgtgcacataacagtcatgcttctgtcatggggcctctgcattttctgttctctgggcttggaactctcctctggtgtgtcagctttggcttgctccttcactatgttgaaatctgcttaaatgtcacccttctaattaagtctttcctgactgtccgctatccttctgccc

SEQ ID NO: 7382 - protein, 1357 aa, Homo sapiens; identical to SEQ ID NO: 1016

SEQ ID NO: 7383 - DNA, 930 bp, Homo sapiens
aggcacctatttttagccaagcctgagggcccccgggagggaaggcggattaccgcctcctcggccggtggacggaggcagcgcgtctccggcggcgtccccgggccggagctgggccacacttacgccatgctggagttccagtcctcgccgctgcctccggcggtctgggcgctcgcccccttccccggcgcccctcccgctgccctttgcgagtccccaggtcagggcgggaggcggttgggcacggaaagcagcatgaggggggactttggaaaaatccatggaccactctcgacaccggcgaagttatcccttcctgtccccgaggggtgtgtcctagcgattcggcctgaccccttcagtttccaaaagtgagatttttggatcacattgacaaaagtaccatggagttttatgagtcagcatattttattgttcttattccttcaatagttattacagtaattttcctcttcttctggcttttcatgaaagaaacattatatgatgaagttcttgcaaaacagaaaagagaacaaaagcttattcctaccaaaacagataaaaagaaagcagaaaagaaaaagaataaaaagaaagaaatccagaatggaaacctccatgaatccgactctgagagtgtacctcgagactttaaattatcagatgctttggcagtagaagatgatcaagttgcacctgttccattgaatgtcgttgaaacttcaagtagtgttagggaaagaaaaaagaaggaaaagaaacaaaagcctgtgcttgaagagcaggtcatcaaagaaagtgacgcatcaaagattcctggcaaaaaagtagaacctgtcccagttactaaacagcccacccctccctctgaagcagctgcctcgaagaagaaaccagggcagaagaagtctaaaaatggaagcg

SEQ ID NO: 7384 - protein, 173 aa, Homo sapiens
MEFYESAYFIVLIPSIVITVIFLFFWLFMKETLYDEVLAKQKREQKLIPTKTDKKKAEKKKNKKKEIQNGNLHESDSESVPRDFKLSDALAVEDDQVAPVPLNVVETSSSVRERKKKEKKQKPVLEEQVIKESDASKIPGKKVEPVPVTKQPTPPSEAAASKKKPGQKKSKNG

SEQ ID NO: 7385 - DNA, 406 bp, Homo sapiens
ttaaaagaattatttgataagggggaaactcattttgtgatactaatttaagatctgttgggtaattcttagaattgttcttctgactctgaaagctttttattaatagtctagaaagcatatgactgaggttttggttatagttgagacttctttcatcttggcagacaaagaatcatttctgtggcttttcctctagtcgtttttattgttgctgttttctaatatagattgagagttcaggaaagtcttctcctgaggaactgacatctaagccaagaatctgaagggctgtagtttgttttaatcaggatccgaataaggtcagtatgtaactggtttgagacatctcttagatattttttaatcctcgggttccccgactctttctcagcaacaccccacc

SEQ ID NO: 7386 - protein, 35 aa, Homo sapiens
FVLIRIRIRSVCNWFETSLRYFLILGFPDSFSATP

SEQ ID NO: 7387 - DNA, 1992 bp, Homo sapiens
tttatagccttccagccttcccctttgctttgatcaactagctcatacaattcatgtaaggttgttttgtggcatgaatgtttggccatgccaagaaagacataggacacagtgggttactatgggattcctaggtagatttgaaacatgttaattgtattaaaccatagagaaaaaacgttacactgcagtggaaagtcctatgagtgttattgggcctcgtttaaacatcacatgaaaagctttttataatacttctatatttgctctgtctttaatcttctaatgttcaatgtacctgaaatcatgtatgtattcttggtttgtgtctttacttttgaatgctttcttctttgtcacatgtgcatagtaattattttaaaagctggcctatttgatatatatactaaaacatggaaagtgggcgtctttattttctcattcaaacttctaaacattgctttttatttttttgctaatatgcatattttcccattgaaataattttgcagtaaccagcatttaaatgcagtgcaaaatactgatgaagtaaaaaagcaaaaatctttcaataatggataaactgaaatcattctttctaaaaatgattaggaccttcgggagaaaaactgggaagcaatggaagcattggcatcaactgaaaaaatgctgcaggacaaagtgaacaagacttccaaggaaaggcagcaacaggtggaagctgttgagttggaggctaaagaagttctcaaaaaattatttccaaaggtgtctgtcccttctaatttgagttatggtgaatggttgcatggatttgaaaaaaaggcaaaagaatgtatggctggaacttcagggtcagaggaggttaaggttctagagcacaagttgaaagaagctgatgaaatgcacacattgttacagctagagtgtgaaaaatacaaatccgtccttgcagaaacagaaggaattttacagaagctacagagaagtgttgagcaagaagaaaataaatggaaagttaaggtcgatgaatcacacaagactattaaacagatgcagtcatcatttacatcttcagaacaagagctagagcgattaagaagcgaaaataaggatattgaaaatctgagaagagaacgagaacatttggaaatggaactagaaaaggcagagatggaacgatctacctatgttacagaagtcagagagttgaaggcacagttaaatgaaacactcacaaaacttagaactgaacaaaatgaaagacagaaggtagctggtgatttgcataaggctcaacagtcactggagcttatccagtcaaaaatagtaaaagctgctggagacactactgttattgaaaatagtgatgtttccccagaaacggagtcttctgagaaggagacaatgtctgtaagtctaaatcagactgtaacacagttacagcagttgcttcaggcggtaaaccaacagctcacaaaggagaaagagcactaccaggtgttagagtgaagtaattgggaaactgttcatttgaggataaaaaaggcattgtattatattttgccaaattaaagccttatttatgttttcaccctttctactttgtcagaaacactgaacagagttttgtcttttctaatccttgttagactactgatttaaagaaggaaaaaaaaaagccaactctgtagacaccttcagagtttagttttataataaaaactgtttgaataattagacctttacattcctgaagataaacatgtaatcttttatcttattttgctcaataaaattgttcagaagatcaaagtggtaaagacaatgtaaaatttaacattttaatactgatgttgtacactgttttacttaacattttgggaagtaactgcctctgacttcaactcaagaaaacacttttttgttgctaatgtaatcggtttttgtaatggcgtcagcaaataaaaggatgcttattattcaaacttg

SEQ ID NO: 7388 - protein, 290 aa, Homo sapiens [sequence omitted]

SEQ ID NO: 7389 - DNA, 2928 bp, Homo sapiens
tttatagccttccagccttcccctttgctttgatcaactagctcatacaattcatgtaaggttgttttgtggcatgaatgtttggccatgccaagaaagacataggacacagtgggttactatgggattcctaggtagatttgaaacatgttaattgtattaaaccatagagaaaaaacgttacactgcagtggaaagtcctatgagtgttattgggcctcgtttaaacatcacatgaaaagctttttataatacttctatatttgctctgtctttaatcttctaatgttcaatgtacctgaaatcatgtatgtattcttggtttgtgtctttacttttgaatgctttcttctttgtcacatgtgcatagtaattattttaaaagctggcctatttgatatatatactaaaacatggaaagtgggcgtctttattttctcattcaaacttctaaacattgctttttatttttttgctaatatgcatattttcccattgaaataattttgcagtaaccagcatttaaatgcagtgcaaaatactgatgaagtaaaaaagcaaaaatctttcaataatggataaactgaaatcattctttctaaaaatgattaggaccttcgggagaaaaactgggaagcaatggaagcattggcatcaactgaaaaaatgctgcaggacaaagtgaacaagacttccaaggaaaggcagcaacaggtggaagctgttgagttggaggctaaagaagttctcaaaaaattatttccaaaggtgtctgtcccttctaatttgagttatggtgaatggttgcatggatttgaaaaaaaggcaaaagaatgtatggctggaacttcagggtcagaggaggttaaggttctagagcacaagttgaaagaagctgatgaaatgcacacattgttacagctagagtgtgaaaaatacaaatccgtccttgcagaaacagaaggaattttacagaagctacagagaagtgttgagcaagaagaaaataaatggaaagttaaggtcgatgaatcacacaagactattaaacagatgcagtcatcatttacatcttcagaacaagagctagagcgattaagaagcgaaaataaggatattgaaaatctgagaagagaacgagaacatttggaaatggaactagaaaaggcagagatggaacgatctacctatgttacagaagtcagagagttgaaggcacagttaaatgaaacactcacaaaacttagaactgaacaaaatgaaagacagaaggtagctggtgatttgcataaggctcaacagtcactggagcttatccagtcaaaaatagtaaaagctgctggagacactactgttattgaaaatagtgatgtttccccagaaacggagtcttctgagaaggagacaatgtctgtaagtctaaatcagactgtaacacagttacagcagttgcttcaggcggtaaaccaacagctcacaaaggagaaagagcactaccaggtgttagagtgaagtaattgggaaactgttcatttgaggataaaaaaggcattgtattatattttgccaaattaaagccttatttatgttttcaccctttctactttgtcagaaacactgaacagagttttgtcttttctaatccttgttagactactgatttaaagaaggaaaaaaaaaagccaactctgtagacaccttcagagtttagttttataataaaaactgtttgaataattagacctttacattcctgaagataaacatgtaatcttttatcttattttgctcaataaaattgttcagaagatcaaagtggtaaagacaatgtaaaatttaacattttaatactgatgttgtacactgttttacttaacattttgggaagtaactgcctctgacttcaactcaagaaaacacttttttgttgctaatgtaatcggtttttgtaatggcgtcagcaaataaaaggatgcttattattcaaacttgacttgttctaatttttattgagctttaacagatttcattagtagtacagatcattgtaatttagaatacagctattaattggcaaccattcaacaagataggtttatgtagcctctgtaacctttctaactgatgctctgggtcctcttcagtttggtccaatgtaaagtgccccaggagtgctggggtttcagaaaggacagagcaagcatttaggatttcagactaaacacccacacttcaggtagaggagctctatttttaccattactatttttttttgaagtaataataattaactgttagttttctttttcaggcacggttacacagtttacatgtgttatcttttttgttgttgttgttgttgttactgtttttttgatacagagtctcactctgttgtccacgcaggagtgcattggcactatctgggcttactgcaacctccacctcccggttcaagcaattctcatgtagctgggattacaggcgcctgccgccatgcctggctaatttttgtatttttagtagaaagagtttttcaccttgttggccaggctggtctcgaactgctgacctcaagtgatccacccatcccaaagtgctcggattaccggtgtgagccactgtgcccagccaatgaaagtttttttaataatttgttaaaaacacttcagatgctaaataaccactgagaaatatcttgtgccattgagtactaaagtacccattaggctgcactgtggtcatcttgttatttttgtgcacataacagtcatgcttctgtcatggggcctctgcattttctgttctctgggcttggaactctcctctggtgtgtcagctttggcttgctccttcactatgttgaaatctgcttaaatgtcacccttctaattaagtctttcctgactgtccgctatccttctgccc

SEQ ID NO: 7390 - protein, 290 aa, Homo sapiens [sequence omitted]

SEQ ID NO: 7391 - DNA, 3697 bp, Homo sapiens
gaaaggtgtgaataagcaacatcatttgcactccacttggtttcagtagagtgctgatttcttgatctttcctattgttaagctggtgcttttcagtaaagattaataacttggttcaaaactcatttctatttacctgatactattgtttctataaaattttatatatgagacattagaggattaaaaacatcatatttgggaaagaaatgttttttaatgctaataaaaccaatatggtaacattcttaatggctttatttaaaacttaattttaagtgattgcttcttagttttagcaacacttccttaatgtacttgatactatgaactaggctctttacattttaaaactcaagatttttggtcatctattaccttcttcaagcagaaatcttacagataatatagaacaacttggtttacttgaggtagtacatgttctcctttgttcagagaattaataattatttgagggcagagaaagtcagtgaatgtgcatgtgagtttcctaaaatagagtgtagggtctttttttttttttcttatttaatggaaaactgttcaacagtagagagacgagcataatgaggcctgatgtacccaacatctctccatagcacttatcagtacatggcacgcatataagcaatcttcttttacctcccaccttgcattccctagattattttgaaggaactcaaacatcagagcatttcttctgtaaatatttcagtacacatttctaaaacataagcatttctttttaaaaagtgtgatattacacttaaaaatacattcttaattttgtatagtatgcatttctccagttgtcataaattgtctgttttattaaataataacttactgtagtttgttttaatcaggatccgaataaggtcagtatgtaactggtttgagacatctcttagatattttttaatcctcgggttccccgactctttctcagcaacaccccacctcctttaaaaaaaaaacaaaaacaaaacttagtggtttcctatgaagtttcccacagtttggatttagttgactgcatccctgtggtgttagcatgttcctcttttctttatgtatcttttatgtatcaaatctgtaatcaggaatctgattcctggtcagattaaggctcagtattttgggggtagggtagagtaggggcaagaccacttcatgggcggtggtgtgcactttcatgaggagattcgtaatgtctgcttgtcttcctttggcccattggaacttatttaggtttgttaccaagtcgttttgacacaatgctgctaaactttgatagcttctatgctttgtggtatgataaggtgctcctgatttatcatatacatttcctgccccaaacatagaatcaactatttctccaaggagctctgtgggtgctaggggtgggagttatggtgaatggttgcatggatttgaaaaaaaggcaaaagaatgtatggctggaacttcagggtcagaggaggttaaggttctagagcacaagttgaaagaagctgatgaaatgcacacattgttacagctagagtgtgaaaaatacaaatccgtccttgcagaaacagtaggaaatgatttttaatctacattttgattttactttaaatcattaccttcttccttcatggcctaaatagttttatcttggcattagaacatgaatttttcaaaacaactatgcttttgtctgtaggaaggaattttacagaagctacagagaagtgttgagcaagaagaaaataaatggaaagttaaggtcgatgaatcacacaagactattaaacagatgcagtcatcatttacatcttcagaacaagagctagagcgattaagaagcgaaaataaggatattgaaaatctgagaagagaacgagaacatttggaaatggaactagaaaaggcagagatggaacgatctacctatgttacagaagtcagagagttgaaggcacagttaaatgaaacactcacaaaacttagaactgaacaaaatgaaagacagaaggtagctggtgatttgcataaggctcaacagtcactggagcttatccagtcaaaaatagtaaaagctgctggagacactactgttattgaaaatagtgatgtttccccagaaacggagtcttctgagaaggagacaatgtctgtaagtctaaatcagactgtaacacagttacagcagttgcttcaggcggtaaaccaacagctcacaaaggagaaagagcactaccaggtgttagagtgaagtaattgggaaactgttcatttgaggataaaaaaggcattgtattatattttgccaaattaaagccttatttatgttttcaccctttctactttgtcagaaacactgaacagagttttgtcttttctaatccttgttagactactgatttaaagaaggaaaaaaaaaagccaactctgtagacaccttcagagtttagttttataataaaaactgtttgaataattagacctttacattcctgaagataaacatgtaatcttttatcttattttgctcaataaaattgttcagaagatcaaagtggtaaagacaatgtaaaatttaacattttaatactgatgttgtacactgttttacttaacattttgggaagtaactgcctctgacttcaactcaagaaaacacttttttgttgctaatgtaatcggtttttgtaatggcgtcagcaaataaaaggatgcttattattcaaacttgacttgttctaatttttattgagctttaacagatttcattagtagtacagatcattgtaatttagaatacagctattaattggcaaccattcaacaagataggtttatgtagcctctgtaacctttctaactgatgctctgggtcctcttcagtttggtccaatgtaaagtgccccaggagtgctggggtttcagaaaggacagagcaagcatttaggatttcagactaaacacccacacttcaggtagaggagctctatttttaccattactatttttttttgaagtaataataattaactgttagttttctttttcaggcacggttacacagtttacatgtgttatcttttttgttgttgttgttgttgttactgtttttttgatacagagtctcactctgttgtccacgcaggagtgcattggcactatctgggcttactgcaacctccacctcccggttcaagcaattctcatgtagctgggattacaggcgcctgccgccatgcctggctaatttttgtatttttagtagaaagagtttttcaccttgttggccaggctggtctcgaactgctgacctcaagtgatccacccatcccaaagtgctcggattaccggtgtgagccactgtgcccagccaatgaaagtttttttaataatttgttaaaaacacttcagatgctaaataaccactgagaaatatcttgtgccattgagtactaaagtacccattaggctgcactgtggtcatcttgttatttttgtgcacataacagtcatgcttctgtcatggggcctctgcattttctgttctctgggcttggaactctcctctggtgtgtcagctttggcttgctccttcactatgttgaaatctgcttaaatgtcacccttctaattaagtctttcctgactgtccgctatccttctgccc

SEQ ID NO: 7392 - protein, 152 aa, Homo sapiens [sequence omitted]

SEQ ID NO: 7393 - DNA, 2761 bp, Homo sapiens
gaaaggtgtgaataagcaacatcatttgcactccacttggtttcagtagagtgctgatttcttgatctttcctattgttaagctggtgcttttcagtaaagattaataacttggttcaaaactcatttctatttacctgatactattgtttctataaaattttatatatgagacattagaggattaaaaacatcatatttgggaaagaaatgttttttaatgctaataaaaccaatatggtaacattcttaatggctttatttaaaacttaattttaagtgattgcttcttagttttagcaacacttccttaatgtacttgatactatgaactaggctctttacattttaaaactcaagatttttggtcatctattaccttcttcaagcagaaatcttacagataatatagaacaacttggtttacttgaggtagtacatgttctcctttgttcagagaattaataattatttgagggcagagaaagtcagtgaatgtgcatgtgagtttcctaaaatagagtgtagggtctttttttttttttcttatttaatggaaaactgttcaacagtagagagacgagcataatgaggcctgatgtacccaacatctctccatagcacttatcagtacatggcacgcatataagcaatcttcttttacctcccaccttgcattccctagattattttgaaggaactcaaacatcagagcatttcttctgtaaatatttcagtacacatttctaaaacataagcatttctttttaaaaagtgtgatattacacttaaaaatacattcttaattttgtatagtatgcatttctccagttgtcataaattgtctgttttattaaataataacttactgtagtttgttttaatcaggatccgaataaggtcagtatgtaactggtttgagacatctcttagatattttttaatcctcgggttccccgactctttctcagcaacaccccacctcctttaaaaaaaaaacaaaaacaaaacttagtggtttcctatgaagtttcccacagtttggatttagttgactgcatccctgtggtgttagcatgttcctcttttctttatgtatcttttatgtatcaaatctgtaatcaggaatctgattcctggtcagattaaggctcagtattttgggggtagggtagagtaggggcaagaccacttcatgggcggtggtgtgcactttcatgaggagattcgtaatgtctgcttgtcttcctttggcccattggaacttatttaggtttgttaccaagtcgttttgacacaatgctgctaaactttgatagcttctatgctttgtggtatgataaggtgctcctgatttatcatatacatttcctgccccaaacatagaatcaactatttctccaaggagctctgtgggtgctaggggtgggagttatggtgaatggttgcatggatttgaaaaaaaggcaaaagaatgtatggctggaacttcagggtcagaggaggttaaggttctagagcacaagttgaaagaagctgatgaaatgcacacattgttacagctagagtgtgaaaaatacaaatccgtccttgcagaaacagtaggaaatgatttttaatctacattttgattttactttaaatcattaccttcttccttcatggcctaaatagttttatcttggcattagaacatgaatttttcaaaacaactatgcttttgtctgtaggaaggaattttacagaagctacagagaagtgttgagcaagaagaaaataaatggaaagttaaggtcgatgaatcacacaagactattaaacagatgcagtcatcatttacatcttcagaacaagagctagagcgattaagaagcgaaaataaggatattgaaaatctgagaagagaacgagaacatttggaaatggaactagaaaaggcagagatggaacgatctacctatgttacagaagtcagagagttgaaggcacagttaaatgaaacactcacaaaacttagaactgaacaaaatgaaagacagaaggtagctggtgatttgcataaggctcaacagtcactggagcttatccagtcaaaaatagtaaaagctgctggagacactactgttattgaaaatagtgatgtttccccagaaacggagtcttctgagaaggagacaatgtctgtaagtctaaatcagactgtaacacagttacagcagttgcttcaggcggtaaaccaacagctcacaaaggagaaagagcactaccaggtgttagagtgaagtaattgggaaactgttcatttgaggataaaaaaggcattgtattatattttgccaaattaaagccttatttatgttttcaccctttctactttgtcagaaacactgaacagagttttgtcttttctaatccttgttagactactgatttaaagaaggaaaaaaaaaagccaactctgtagacaccttcagagtttagttttataataaaaactgtttgaataattagacctttacattcctgaagataaacatgtaatcttttatcttattttgctcaataaaattgttcagaagatcaaagtggtaaagacaatgtaaaatttaacattttaatactgatgttgtacactgttttacttaacattttgggaagtaactgcctctgacttcaactcaagaaaacacttttttgttgctaatgtaatcggtttttgtaatggcgtcagcaaataaaaggatgcttattattcaaacttg

SEQ ID NO: 7394 - protein, 152 aa, Homo sapiens [sequence omitted]

SEQ ID NO: 7395 - DNA, 5303 bp, Homo sapiens
tctgctttgatcttaccacctgactaaagactttagtaccaagactatttattataacattgtttaataaaaatgaccaaaagggttattgaatgaacttcatcgctacttagaaaggttgaaatgtagtgtttccttataaaacactttgaaaccatttatcataatacagtattaagtactaaaacaaacttgaagcataaaactttctggtagaattatggagtttttctttatttcgttctttgcaggttctagagcacaagttgaaagaagctgatgaaatgcacacattgttacagctagagtgtgaaaaatacaaatccgtccttgcagaaacagtaggaaatgatttttaatctacattttgattttactttaaatcattaccttcttccttcatggcctaaatagttttatcttggcattagaacatgaatttttcaaaacaactatgcttttgtctgtaggaaggaattttacagaagctacagagaagtgttgagcaagaagaaaataaatggaaagttaaggtcgatgaatcacacaagactattaaacaggtatttacaaaagaaaagcttagagcagtggttctcgatgtgtggggcttgaaccagcagcatcagcatcaccatgcacattcttgggccccaacccagctaccaaatccaaaacatgtatgtggggtggcagcagtctgtgttttcatgagccctccagaatagtctaatgcccacccaagtttgaaaatcactggttttaaagtatgactaaagggtaatcatatagaatgtagaatgctagttacagaactattgtgtgataaggtaaagaatactgggttcaaaatcagttttaaagtatttaacccataatatagaattcaagaaaaagtcattcttctattcctgggacctgaatgttattttgcaaccttaatttttctcccttttacttcagcgtgataaagagtaccattactcacttattttttggggccaatgtgcagaatttacagttgctgatggtactctaatgcacttgcagaataaatacagctgaatatcagttaatactaataaaaaattaatcacttttagccgagcctaatatacaaatggagtaggtttggaccacaatttaaatcaagttcaatgtgactcatttttaaggtcttttaaaattcatctcttttaaatgagatgcatttcaaaaccttggaagtgtcttttaattgatcagaattctacaggatagaaactgctatatccttggtggttttacttggccatgtaattgtttcacatttcagatgcagtcatcatttacatcttcagaacaagagctagagcgattaagaagcgaaaataaggatattgaaaatgtatgttatttgattgttttacttgtaacctatggatttgtttttagcattaacggttgtctgaagatctatagtttaagattactttatagttatgctcttaatatcttgggtagtgtttgagttgatatagttttatattcataagtgtcataattttgtcttgtggggaaatattatgaaaggaaattttaagtgtgttaacttttcctttgttgcattgctagctgagaagagaacgagaacatttggaaatggaactagaaaaggcagagatggaacgatctacctatgttacagaagtcagagaggtacttacaacagaatcttttcaaacttgcttctcaattcagattaagtttataacagtgatatttcagtataagttgtttgtggcagagcttccgagtagcatacaaaacatgggctatcataaggagatcaatcttaaactctaaacttcattgcagctgaaagatctgttgactgaattgcagaaaaaacttgatgattcatattctgaagcagtaagacagaatgaagagctaaatttggtaagaagcttgtcctccactgggtatcaagtaggcactgaaaacactttattgacatgtggagaaaccatccaggcttttttttctttgctaacatctttagcttggcctttttgtaagtctaagataatcttcatattccgatgattcctaagattatctttcttttcttgactcctaaaatgatccttcttttcttagctcctaacaatggcatgtttggcttccaactctttttcaaaattttccatgttttataaatcctattttctcaaacagcagtcttttctgtgaataaagaaatgaaataaagattggctgagttacgaagattttcttctcagactatcatagttaatggggccttttattttctaacctgggagaagattatattgaaagtcaaagacacatattcttcattcaagggcagtaatctaatccagtttctaattttaacctagtctctctatatattacaaatattaaaaagcgtataagagtctttattatcaacatattatttagagtatagtaatcctaaaagcataggctttgagataaagttagctaaatgtcttaaaacatataataccctgtattcctattctcaagttttctaaaaactgtactgattgtgacagacttagctattagacaaatatggctgtcttgctctctgtttcaaacagcaattgttatgtcttccttgtgagttaaaaattgttacagcacagggattagattttttttttttaagtaccttaataaactctcagaagattacagtagtaagttttttccttacccaaagttcaccctgcccagtttggaattttcttgttagcattactccatgtaccaagaaaactttaactcattcatttgtggttggtatcctatgttatggcaaacatttatgggaatcaatttttagagtagagcggtatgaaatacaggttgcgtattctttatctggaatgcttggaaccagcaattttggggggggattttggattatttgtattatatgcttgctctgtatgtgtcccttatctgaaaatccgaaatctgaaatgctccagtgaacatttcctttgagtgtcatgtcagtgcttaaaaagtttaggattttggagcatttcaaagttcagattttcagattagggatgttcatacacacagagccctacacacacagagccctacacctctaatttttaaatctttgttttatgtaccaatgttttactttaactgaactcattcaccctgcattgtgagactggttctatgctatgcattgcacagattaggactgtgatatgtcatggctataagtcctcactctatgtttttaaaaaatcatttctaactagttgttagagttttacttattaactttggtgcttagtggctgactcaacagttacatggttacatctccacttggcttaatgctttattttgattttttatccctctacttctgtcaggagatcatttttagtggttgatacttactttttttccctagtcttgagtttgggatctttattttaatgtttgtttgctcagaataactgctgctactttttatgataaaatagctttgtttgcctgtacgtgctttgtgtattcttgggccaaaagattaatttctctgatggagaatattaaaactcaaagttgtgtaaaggaccagaatttatttgggtacttacatagaattcctcagataaaatttccaagtggaatttccctccgccccactgccacccctttttaattctccctccaattttaaatgtcactgccttgtctttccccctttgggcctctagaactgtttcaaaagtgcccatgggtgggaagcaaaaacaattaccttatgagaataagaagaaagttttttgggagcagtatagttcattttccttgctcatatttaattggaaaatcagagaagcggcattatatattcgcattggagttacagaactttctgttttgacagattgggttattcataggtatatcgtaaagcatttcttgatggtataatacaggccagtgtggtcttgtactaccccttagtgaagccttaaacgatggtcagtattttgggagttttaatttgactggatttgtagtcttctattcagtgtttttaaaaatattgtataattgactctttaattgaactgtatagattaagaaagcctttaaaaactaacgggtaaagtatctatttggcttttaatttgaaataatttcagtgactgttataaatagtgatatctttaaaaggtactttactggaatttgatggttttgtttttgcatttgcagttttctactctaaactgtagttcatttctgtggcttttcttatgtttagctttacagatgggaacctctactgcttagcctttctatacatctggtgcagcatattggctaatccactgtacataataactgttagcagtcccattcattcttcagtcctagaggtatcagcataatcaaagaatgatgcaaattaagttaattgtggtgttcctttatttttacagttgaaggcacagttaaatgaaacactcacaaaacttagaactgaacaaaatgaaagacagaaggtagctggtgatttgcataaggctcaacagtcactggagcttatccagtcaaaaatagtaaaagctgctggagacactactgttattgaaaatagtgatgtttccccagaaacggagtcttctgagaaggagacaatgtctgtaagtctaaatcagactgtaacacagttacagcagttgcttcaggcggtaaaccaacagctcacaaaggagaaagagcactaccaggtgttagagtgaagtaattgggaaactgttcatttgaggataaaaaaggcattgtattatattttgccaaattaaagccttatttatgttttcaccctttctactttgtcagaaacactgaacagagttttgtcttttctaatccttgttagactactgatttaaagaaggaaaaaaaaaagccaactctgtagacaccttcagagtttagttttataataaaaactgtttgaataattagacctttacattcctgaagataaacatgtaatcttttatcttattttgctcaataaaattgttcagaagatcaaagtggtaaagacaatgtaaaatttaacattttaatactgatgttgtacactgttttacttaacattttgggaagtaactgcctctgacttcaactcaagaaaacacttttttgttgctaatgtaatcggtttttgtaatggcgtcagcaaataaaaggatgcttattattcaaacttg

SEQ ID NO: 7396 - protein, 34 aa, Homo sapiens
MSVSLNQTVTQLQQLLQAVNQQLTKEKEHYQVLE

SEQ ID NO: 7397 - DNA, 2247 bp, Homo sapiens
agagtagagcggtatgaaatacaggttgcgtattctttatctggaatgcttggaaccagcaattttggggggggattttggattatttgtattatatgcttgctctgtatgtgtcccttatctgaaaatccgaaatctgaaatgctccagtgaacatttcctttgagtgtcatgtcagtgcttaaaaagtttaggattttggagcatttcaaagttcagattttcagattagggatgttcatacacacagagccctacacacacagagccctacacctctaatttttaaatctttgttttatgtaccaatgttttactttaactgaactcattcaccctgcattgtgagactggttctatgctatgcattgcacagattaggactgtgatatgtcatggctataagtcctcactctatgtttttaaaaaatcatttctaactagttgttagagttttacttattaactttggtgcttagtggctgactcaacagttacatggttacatctccacttggcttaatgctttattttgattttttatccctctacttctgtcaggagatcatttttagtggttgatacttactttttttccctagtcttgagtttgggatctttattttaatgtttgtttgctcagaataactgctgctactttttatgataaaatagctttgtttgcctgtacgtgctttgtgtattcttgggccaaaagattaatttctctgatggagaatattaaaactcaaagttgtgtaaaggaccagaatttatttgggtacttacatagaattcctcagataaaatttccaagtggaatttccctccgccccactgccacccctttttaattctccctccaattttaaatgtcactgccttgtctttccccctttgggcctctagaactgtttcaaaagtgcccatgggtgggaagcaaaaacaattaccttatgagaataagaagaaagttttttgggagcagtatagttcattttccttgctcatatttaattggaaaatcagagaagcggcattatatattcgcattggagttacagaactttctgttttgacagattgggttattcataggtatatcgtaaagcatttcttgatggtataatacaggccagtgtggtcttgtactaccccttagtgaagccttaaacgatggtcagtattttgggagttttaatttgactggatttgtagtcttctattcagtgtttttaaaaatattgtataattgactctttaattgaactgtatagattaagaaagcctttaaaaactaacgggtaaagtatctatttggcttttaatttgaaataatttcagtgactgttataaatagtgatatctttaaaaggtactttactggaatttgatggttttgtttttgcatttgcagttttctactctaaactgtagttcatttctgtggcttttcttatgtttagctttacagatgggaacctctactgcttagcctttctatacatctggtgcagcatattggctaatccactgtacataataactgttagcagtcccattcattcttcagtcctagaggtatcagcataatcaaagaatgatgcaaattaagttaattgtggtgttcctttatttttacagttgaaggcacagttaaatgaaacactcacaaaacttagaactgaacaaaatgaaagacagaaggtagctggtgatttgcataaggctcaacagtcactggagcttatccagtcaaaaatagtaaaagctgctggagacactactgttattgaaaatagtgatgtttccccagaaacggagtcttctgagaaggagacaatgtctgtaagtctaaatcagactgtaacacagttacagcagttgcttcaggcggtaaaccaacagctcacaaaggagaaagagcactaccaggtgttagagtgaagtaattgggaaactgttcatttgaggataaaaaaggcattgtattatattttgccaaattaaagccttatttatgttttcaccctttctactttgtcagaaacactgaacagagttttgtcttttctaatccttgttagactactgatttaaagaaggaaaaaaaaaagccaactctgtagacaccttcagagtttagttttataataaaaactgtttgaataattagacctttacattcctgaagataaacatgtaatcttttatcttattttgctcaataaaattgttcagaagatc

SEQ ID NO: 7398 - protein, 34 aa, Homo sapiens; identical to SEQ ID NO: 7396

SEQ ID NO: 7399 - DNA, 3363 bp, Homo sapiens
agagtagagcggtatgaaatacaggttgcgtattctttatctggaatgcttggaaccagcaattttggggggggattttggattatttgtattatatgcttgctctgtatgtgtcccttatctgaaaatccgaaatctgaaatgctccagtgaacatttcctttgagtgtcatgtcagtgcttaaaaagtttaggattttggagcatttcaaagttcagattttcagattagggatgttcatacacacagagccctacacacacagagccctacacctctaatttttaaatctttgttttatgtaccaatgttttactttaactgaactcattcaccctgcattgtgagactggttctatgctatgcattgcacagattaggactgtgatatgtcatggctataagtcctcactctatgtttttaaaaaatcatttctaactagttgttagagttttacttattaactttggtgcttagtggctgactcaacagttacatggttacatctccacttggcttaatgctttattttgattttttatccctctacttctgtcaggagatcatttttagtggttgatacttactttttttccctagtcttgagtttgggatctttattttaatgtttgtttgctcagaataactgctgctactttttatgataaaatagctttgtttgcctgtacgtgctttgtgtattcttgggccaaaagattaatttctctgatggagaatattaaaactcaaagttgtgtaaaggaccagaatttatttgggtacttacatagaattcctcagataaaatttccaagtggaatttccctccgccccactgccacccctttttaattctccctccaattttaaatgtcactgccttgtctttccccctttgggcctctagaactgtttcaaaagtgcccatgggtgggaagcaaaaacaattaccttatgagaataagaagaaagttttttgggagcagtatagttcattttccttgctcatatttaattggaaaatcagagaagcggcattatatattcgcattggagttacagaactttctgttttgacagattgggttattcataggtatatcgtaaagcatttcttgatggtataatacaggccagtgtggtcttgtactaccccttagtgaagccttaaacgatggtcagtattttgggagttttaatttgactggatttgtagtcttctattcagtgtttttaaaaatattgtataattgactctttaattgaactgtatagattaagaaagcctttaaaaactaacgggtaaagtatctatttggcttttaatttgaaataatttcagtgactgttataaatagtgatatctttaaaaggtactttactggaatttgatggttttgtttttgcatttgcagttttctactctaaactgtagttcatttctgtggcttttcttatgtttagctttacagatgggaacctctactgcttagcctttctatacatctggtgcagcatattggctaatccactgtacataataactgttagcagtcccattcattcttcagtcctagaggtatcagcataatcaaagaatgatgcaaattaagttaattgtggtgttcctttatttttacagttgaaggcacagttaaatgaaacactcacaaaacttagaactgaacaaaatgaaagacagaaggtagctggtgatttgcataaggctcaacagtcactggagcttatccagtcaaaaatagtaaaagctgctggagacactactgttattgaaaatagtgatgtttccccagaaacggagtcttctgagaaggagacaatgtctgtaagtctaaatcagactgtaacacagttacagcagttgcttcaggcggtaaaccaacagctcacaaaggagaaagagcactaccaggtgttagagtgaagtaattgggaaactgttcatttgaggataaaaaaggcattgtattatattttgccaaattaaagccttatttatgttttcaccctttctactttgtcagaaacactgaacagagttttgtcttttctaatccttgttagactactgatttaaagaaggaaaaaaaaaagccaactctgtagacaccttcagagtttagttttataataaaaactgtttgaataattagacctttacattcctgaagataaacatgtaatcttttatcttattttgctcaataaaattgttcagaagatcaaagtggtaaagacaatgtaaaatttaacattttaatactgatgttgtacactgttttacttaacattttgggaagtaactgcctctgacttcaactcaagaaaacacttttttgttgctaatgtaatcggtttttgtaatggcgtcagcaaataaaaggatgcttattattcaaacttgacttgttctaatttttattgagctttaacagatttcattagtagtacagatcattgtaatttagaatacagctattaattggcaaccattcaacaagataggtttatgtagcctctgtaacctttctaactgatgctctgggtcctcttcagtttggtccaatgtaaagtgccccaggagtgctggggtttcagaaaggacagagcaagcatttaggatttcagactaaacacccacacttcaggtagaggagctctatttttaccattactatttttttttgaagtaataataattaactgttagttttctttttcaggcacggttacacagtttacatgtgttatcttttttgttgttgttgttgttgttactgtttttttgatacagagtctcactctgttgtccacgcaggagtgcattggcactatctgggcttactgcaacctccacctcccggttcaagcaattctcatgtagctgggattacaggcgcctgccgccatgcctggctaatttttgtatttttagtagaaagagtttttcaccttgttggccaggctggtctcgaactgctgacctcaagtgatccacccatcccaaagtgctcggattaccggtgtgagccactgtgcccagccaatgaaagtttttttaataatttgttaaaaacacttcagatgctaaataaccactgagaaatatcttgtgccattgagtactaaagtacccattaggctgcactgtggtcatcttgttatttttgtgcacataacagtcatgcttctgtcatggggcctctgcattttctgttctctgggcttggaactctcctctggtgtgtcagctttggcttgctccttcactatgttgaaatctgcttaaatgtcacccttctaattaagtctttcctgactgtccgctatccttctgccc

SEQ ID NO: 7400 - protein, 34 aa, Homo sapiens; identical to SEQ ID NO: 7396

SEQ ID NO: 7401 - DNA, 7697 bp, Homo sapiens
cagagccctacacctctaatttttaaatctttgttttatgtaccaatgttttactttaactgaactcattcaccctgcattgtgagactggttctatgctatgcattgcacagattaggactgtgatatgtcatggctataagtcctcactctatgtttttaaaaaatcatttctaactagttgttagagttttacttattaactttggtgcttagtggctgactcaacagttacatggttacatctccacttggcttaatgctttattttgattttttatccctctacttctgtcaggagatcatttttagtggttgatacttactttttttccctagtcttgagtttgggatctttattttaatgtttgtttgctcagaataactgctgctactttttatgataaaatagctttgtttgcctgtacgtgctttgtgtattcttgggccaaaagattaatttctctgatggagaatattaaaactcaaagttgtgtaaaggaccagaatttatttgggtacttacatagaattcctcagataaaatttccaagtggaatttccctccgccccactgccacccctttttaattctccctccaattttaaatgtcactgccttgtctttccccctttgggcctctagaactgtttcaaaagtgcccatgggtgggaagcaaaaacaattaccttatgagaataagaagaaagttttttgggagcagtatagttcattttccttgctcatatttaattggaaaatcagagaagcggcattatatattcgcattggagttacagaactttctgttttgacagattgggttattcataggtatatcgtaaagcatttcttgatggtataatacaggccagtgtggtcttgtactaccccttagtgaagccttaaacgatggtcagtattttgggagttttaatttgactggatttgtagtcttctattcagtgtttttaaaaatattgtataattgactctttaattgaactgtatagattaagaaagcctttaaaaactaacgggtaaagtatctatttggcttttaatttgaaataatttcagtgactgttataaatagtgatatctttaaaaggtactttactggaatttgatggttttgtttttgcatttgcagttttctactctaaactgtagttcatttctgtggcttttcttatgtttagctttacagatgggaacctctactgcttagcctttctatacatctggtgcagcatattggctaatccactgtacataataactgttagcagtcccattcattcttcagtcctagaggtatcagcataatcaaagaatgatgcaaattaagttaattgtggtgttcctttatttttacagttgaaggcacagttaaatgaaacactcacaaaacttagaactgaacaaaatgaaagacagaaggtagctggtgatttgcataaggctcaacagtcactggagcttatccagtcaaaaatagtaaaagctgctggagacactactgttattgaaaatagtgatgtttccccagaaacggtatgtattttcttcatccccagatctctgagctagttaccttgtgacctgtgtaaagaacaaaaatgtataaggtccatctccgaaagtcatctttcttgaaaatatcctgtccctaaaatgtagtgttttcattgatgtttgatctcatttttgcttattgaggtatgttaattttaagggttgtgttgagaggtatggagcgggggtccccaattcctggactgtggacaggtaccagtcaatggctttttaggaaccaggccacacagcaggagatgagtggtgggtgaatgaccattgccgcctgagctctgcctcctgtcagatcagtggcagcattagattctcataggagtgcaaaccctattgtgaactgcatgctccttatgagaatctaatgcctgatgatctgaggtggaacagtttcatcctgaaaccatccccgcactcacccatctgtggaaaaattgtcttccacaaaactggtccctggtgccaaaacggttgggtattgctggcctagagtatagactctggagctagactgcctatgtttgaatcctggctctgccacttagtagccatgtgaatttgggcagatctttagccactttgtgctttagttgccccatctgtaaaaggcaatgataatagtacctatcctgtagggtttttgaaagaagtaaatgagttaatacataaaacacttaaaatagtaggtggtacttacaacagtgcctggcacttacttactaagagctcagtatatgttaactttttttactgtttggaatgtactttcttttgcggggcaaattttctttttctgaaagaaaaaatggatatatttctgatattcatagattctagattttttttccttttgtgtccaagtgacaacatttataacatagttttctttggtgccaactagtttgcaccactagttagcaaacagtatttctctatgtggtttttgttattgttgattttcatgtcattgttcagattttttaatgtttgtgtttaaatcagcaatataacattttctgttgtttggttttacatttcttttccttgtgtatggagtttatcatcacttccatcttctttttaggagtcttctgagaaggagacaatgtctgtaagtctaaatcagactgtaacacagttacagcagttgcttcaggcggtaaaccaacagctcacaaaggagaaagagcactaccaggtgttaggtaaggacaactgaaatattgctgtctatgggtaattgatgttatgtgtctgtgtaatgtgtatttacataaataaactcacttcactagaggaaatattccttctttatctctcagaacttccagatgacagccttaagctttcttggagctttagttctattttgtgcatatcttgaaggtcttgtagcttggaggggttatctgtgcctcctttgacctttgtatcaaacagactctcttgtaacttggctgcctgggtttttgtgtgttgccttaatacctgcaacggcttcgttaatttattctgttcttagtttagagtaagtatctgtgaccttttctcccccctcccttccttcctcctttcctccctcccaaaataaaatgaccataacattttaactgaggtaaggttgctaaactggaagtaaggtcatcacagtgtcttaaaattgaaagctggtttttattcaagtttgcttttgttaggtaatctaagaaattcgttcattagctcctgaagtgagatttttacttgaggatagctaaacccataattaaccaagtcatgttatgagcttttattgtctatattaccttggaaggctcagatttggtagcattttaaaatgacttgtattccagccggtgaatgcagtttttgtttttctggttgtagggtttttttttttttttctgttgctacctggattttacctgttttatgaataacttaagtcacactgcctagagtgtaattagagtattcagatatgcactgaatacttcagatattcttcttttgaagatattttctctaaaacaatcatgatatcctggagaccctgaggggcaactcatcactgaattatccctttcagaacccctgataatactgtgttgggctatacaaggcctcagggagagcttaggtatcctggaaaagttgggatggacttccattttgatcttacaggagcgttttgtctcactttagagtgatcatcctctggcctaccttgacacatgctctccttcaaaatgctaattcaggtcagttatctctaacatgactttccatataataagcccagctcattcttcaacatatcaacaaaagtaattaagcctcagctcaaatcttttatccttggtaagctgacttctccagtttcccaatgtaaaaattctgccacatttcctcgcttttccaaattaggaaataaccttgcttcctagggaaacttccatcgcttcttcccaggacttcagccttattctttccactggctccctctgttcagtcttgaaaacatgctcagatggcttattttaaccttgtacttccttcaggttaccacccttatttttttacttttttactatttagtattcttaagaaaatactctctatctacttatttattgttattgattactttatacactctagaatggcttttcttcctgctatttcaatgaaatcatttttgcaaaaatcattaatgatccctaattgctagatccaatataggcccttcttttgcatgtgatcagatactgaaagtacttaatgaaatatgtcaaaaatgctgacattagacctttgtcttataagggaagggtttcatttctagagagcttaaacaattaaaagattgcctattaccccttgcctttcgacctaagcgatattctctctttagcatctcatagatgttctttaatattttccttttcttcctaaatacatagtctgctcattttaagtcttgtgaactatttttggcttgtccattgccacatttgttttaattgtattacacttgagacatatgaatcattgataataacactttttctttttgatttgcagaattatagtaatttattaaaatatgtctgtataccctcacaacgcagttggcaggcagctcccctcctaactgatagcacaacattcttttgtcagctgataaacataagtccaagtttggcaagtgggtggttgacagtattatatcatgaatgataggctggattgttatgaaaatagaggcccaccaggcactctcgaacttcttcattccttaggctctacctggcattgacattgataattcttccttgtgtacttatgttttggttcccgtagctcttctttatacccgttaaatgtttgtgttaccctcaggtttttatccttagctatcatttttgctacatatattctccctcctgtatactctatttaaactgacacgagatgattacattgaaaatacacatttctcaatcattagaatgtaggtaatagcttaatatatctaatgtcaagaaacctttaaaaatatacacaagtacttatgaattgtttatgataatgctgcacatattcaataaagggagagttgtttttaaaaacaaatatgcaagaaataatatgcattgatgtagtttttctaaatcctgatacatagtacttagcgtttcttagagctgtaggggtaggtgtatttaactgatatctttaatttgtgaaaacttttcttttggaaatttttttccccattacctatttttcctccccccatcaaaaaaagaaaagggtaccatcctccgctttccatttgtggggagtgggagattgattaagatgccttttatatgaattgacagtattggcattttataatatacttttttgttcccagatatctactctttatgtttcacatttgcctggtttctaagttttctaggtgtatttctaaccaaatcagaaaactttattatcccaggttaccttatcttggaaccagtttatagaatcctgttgagggaggatgataatttaaatagctgatacttcatgagtatgcctgttagcataagcatgcttccaacatgtggcaactcctttaatcttcacaaccaccctgtgtgttaggtaggtaggtattattattaccatgttacaacagacccaaagagattctataacttgtccaaggtcatacggctaataaatgggcgagctggggtttaaatcaaggtaatttgggtacagggcttgtgttcttaatcagtgcttttcttctccctaattcaggcactgtgttcactgatcccttttgtcactgttttcttttctcctcattttgtctttttatttttttttggccagcctcttagaagttttgtcaatcaattctgactttttcctaaagttgatatttggtttgtcagtagcgtattggagaggcttacagtagtatccagaagaaatggaggtgaagctctgtgtgtactctctgtactccctttaacaaatagattcttaagtgtttctgaaagaaaaagtccttttgtagggctcctgaagtacaagagttaatgctctggagaaaaacttatcttatttctacactgaaccttagctatcatatggatcaggttttcattttctgtgtttacatagcactttagagtttaatgtactagtgatctttttagactttccgatcaactgttaatagccagtgataactttgctttttaattttccaattgcttctttcctctaaactttttatttcaacacataaagttgaaagaatagtacaacacccgtaaaccctccacctgcttcatctctttctatatgtctacatattttgttgttaaactaattgaaagtaacttttagtcattatgacattttatctctaagtactttagcacacatctccgaaaacaagacattgttttaccaatcagtggtaccattattacaaccaaaaagacaaaatagtagttatgtactatccaatattaaacgtttattcacattttgtcaattgtacccaaaatagctttttaactattttccccaaaccagaatccaaggcaaaatttaacatgttgtgttttgttaagtcctcttagtctctctaatggcttttgaagtttaatttctttagtcatcttatctgacttagaaaacttcatatgacctaaaaaaaaaaaaaaaaatctatttctgctcttttaaattatttattcactggggtaaggttgtattcaaccccttttcagtgctactcactcactttagctttacattctcttgagtaggactaataaaaatggattaccagtgttgttgttttaaatgttttctaacagaatttggctcacatttaaaagtatctacctaaaagcttgtttcctttgaatcctgagatttttctcagtttgattaccattagtgtgaattgctttgagtctatttgaaagggccatgctagatcaaatggaatatgtacttttggtgtttgacaaatgtcttctgattgccttctgttgctttgttttaaagtgaaattcattctttctgatcttttacagagtgaagtaattgggaaactgttcatttgaggataaaaaaggcattgtattatattttgccaaattaaagccttatttatgttttcaccctttctactttgtcagaaacactgaacagagttttgtcttttctaatccttgttagactactgatttaaagaaggaaaaaaaaaagccaactctgtagacaccttcagagtttagttttataataaaaactgtttgaataattagacctttacattcctgaagataaacatgtaatcttttatcttattttgctcaataaaattgttcagaagatcaaagtggtaaagacaatgtaaaatttaacattttaatactgatgttgtacactgttttacttaacattttgggaagtaactgcctctgacttcaactcaagaaaacacttttttgttgctaatgtaatcggtttttgtaatggcgtcagcaaataaaaggatgcttattattcaaacttg

SEQ ID NO: 7402 - protein, 68 aa, Homo sapiens
MSLPCLSPFGPLELFQKCPWVGSKNNYLMRIRRKFFGSSIVHFPCSYLIGKSEKRHYIFALELQNFLF

SEQ ID NO: 7403 - DNA, 459 bp, Homo sapiens
tgtgctgcttggagcatcttctgctatcttgtatccattcagaagctgcgttgaagatggcacagcagaatgatgctccctgagaagaggatcttcaattcatttatgcctcccggagctcctggaacagcactgccttacagatagcagtgtgttatccagggctgacaccagaaccatttacagcaaggctgcctctgtcctcacaatattacttttgaggaagaaatcagaagaaaaatggaagacaaaaagagacagaactctttgcagtaggggcatctttttaaggaagctcagaatagccctccagaaccatttacccagacctcttcaatgttcaaacatgagcctgtgaagctcccagttcctccttttctcaattaagctataattagcagaatagttgttcttagatactttggtgaccttggaaatataagatattccagaaataga

SEQ ID NO: 7404 - protein, 45 aa, Homo sapiens
EEDLQFIYASRSSWNSTALQIAVCYPGLTPEPFTARLPLSSQYYF

SEQ ID NO: 7405 - DNA, 422 bp, Homo sapiens
atgggtgtatcagctaaggcacctaacatgagcatgagctccctgagaagaggatcttcaattcatttatgcctcccggagctcctggaacagcactgccttacagatagcagtgtgttatccagggctgacaccagaaccatttacagcaaggctgcctctgtcctcacaatattacttttgaggaagaaatcagaagaaaaatggaagacaaaaagagacagaactctttgcagtaggggcatctttttaaggaagctcagaatagccctccagaaccatttacccagacctcttcaatgttcaaacatgagcctgtgaagctcccagttcctccttttctcaattaagctataattagcagaatagttgttcttagatactttggtgaccttggaaatataagatattccagaaataga

SEQ ID NO: 7406 - protein, 106 aa, Homo sapiens [sequence omitted]

SEQ ID NO: 7407 - DNA, 773 bp, Homo sapiens
tgtgtgatggggccggagccagtaaacaggcttccttctcgctctgctgtataagaagaagaagtaggagaaacaaaataaggaggagaagaagtaaaataatttgagaaggaatatgaagaaactgaaactagcctgagaaggaagatactgagtcagatggagccatttatatatggagatccaggatttataagatccataccattgaatttgaagtaaggatacgatcaagctgataatccaaagtgcactaacttctaaggacggaaatgtttctctggggctatcattgcaccctcgctctctggaatttcggtatcatgagaacacataagtaagagccaaaattcatagggattctgcctggagaggaacacagggattctgaaataaccatgacatacataagtacctccaattatttgcctctcagacaaagccagcagctgttgaaatatggtaagaaaaatggttcaggggttttcccccatgactcaagacaagcatttacattatttacacactcaatgtctcttctgacttatgattgccttacaatctatggaatatatttagtgtccctgtggaagcaattatacatgaaacatcaacatatatttatatagtagacagcactttcataggtccctgcagtgtattttaacagtagtggaaactaaagttttggtgtaatgtgtttttatctatcattcagatcaaagaatacccagtacttgaaaagtttagaaagcagttgaaagttacataga

SEQ ID NO: 7408 - protein, 76 aa, Homo sapiens
MTYISTSNYLPLRQSQQLLKYGKKNGSGVFPHDSRQAFTLFTHSMSLLTYDCLTIYGIYLVSLWKQLYMKHQHIFI

SEQ ID NO: 7409 - DNA, 887 bp, Homo sapiens
attatttgttaggctcagagaattggttaaaccactgagttgccactacctgactcaggtccaaacatggtattttttgtcaagaaatcttttgtgttcctttatttaaatggaaggccattcgaattgttacgttttgtgactcacactccagtttctcttcagatcatataaatctttcaccttttgtgactcacaattataaaagattatctacatttatctaaagaaaaagaaataggtcagattcccagactgggccataggcttttattagtatgagaaggtttaagaaaaatggtaggtagggagagagaaactctgctttgcatagagatttttaaacagccagagagagagaaaacaatgagaaataaagttctgagattcaggggcattcttggtctagagatataaatgatttttcattgcttcattaaagacgcaagatcactcagatattcaaggtaggggctaaagggaagtgggctcaatataaaatcttgaataataccaacatttaaagtctggctgatgaagactatcagaagaaagaaatcaggaaatggtggcaagagttttcttttctacccccttgaaaagacatggttaaaagactgatgtctgttaaaaaatggattaaaacttggagatgaataaatacagtgcctcagctatatggagcttatgctatgagctggtatgtgagcttggattcaagcctaagtcactgactccatgattcatgctcattactgatgctggagagaaaaaagaaatggattctgcagctcattgctcattgtcttaaagagggagtggtattccttgtttttgtttttaatgaaatggttttttaaaataaaatataattttctcattttcat

SEQ ID NO: 7410 - protein, 39 aa, Homo sapiens [sequence omitted]

SEQ ID NO: 7411 - DNA, 664 bp, Homo sapiens
agtatttccctgtctcctgtccatatcaccacacacacacacatagcaatgttagtacaaattcccaggctttccctttggaggtgtccagcactgagaaagatgtgaaattggctactgcttcagagggataagagcaccattttttagtaaaaaggaattcattcttccaactttccaagatagatttcttttttttttttcctaaggcctccatgggtttattttctcaagtcagactgaacagctttgactgtggcagctttaacttaattcattttactgaaggttttttaaaaagagtggttcagagcatggagtcattatggtgactagggattacatgttggcctgtgtcctgcaggagccagccatctccaggcatccacgaatcagttattttgccttcaagtctgattcttgaggggcaaatgctgtcaacctctctgtggattgaagcagggaaatacagtgttagtctcagcaattgcctgccgtccactggaattgaaatagaaaagaggaagctgaatttcctatagctgagtcagttttagacttgatccagtggactggctaattaattaatgtcaactcagtagacatttattgggcacctattatgtacattataaaacactgagtatataaaaccaaaaaaaaa

SEQ ID NO: 7412 - protein, 38 aa, Homo sapiens
MGLFSQVRLNSFDCGSFNLIHFTEGFLKRVVQSMESLW

SEQ ID NO: 7413 - DNA, 547 bp, Homo sapiens
agctagagggaatcttgcaaaagcaggcaagatgctaaaaagtgggctggtatggaaagctctttaatggcaaaaaaaaatgtgtataaggagcaagaataatgtccctcatctccaaagatgtccgtgtcctatctcctaatcacaagaacctatgaatacgttgctttacatggcaaagggactttgaggatgtcattagaggtcctgagattagtgacttcaacatgaattttggggaacatgttcagcacataacatagatgaaagaagagtgtcatgagccaaggaatgtaggtggcccgaagaagctggagaaggcaaggaaatggatttttccctagagcctccagaagggaaagcagctctgatgatgccttagttttaacccagtgaaaaccatgtcaaatttctaacctacagaactattagaaaatcaatttatgttgttttaagccactaaatttgagatttttttgtcatgttagtaacagaaagctaatggaatgtcaaaacttaaggaccaaataaatacatcttgagaccc

SEQ ID NO: 7414 - protein, 36 aa, Homo sapiens
MSVSYLLITRTYEYVALHGKGTLRMSLEVLRLVTST

SEQ ID NO: 7415 - DNA, 819 bp, Homo sapiens
gtgtttccaagggaaagcatgtggcatttcacctgagttatgtattgtttcaaacatccagtggagggtttctggtatctctcttgaactctggtgtttttacaagaggcacacaaaagagagacacagagagaagatgagaagactgaggcagacattggaatgacgcaaccaggagccaaggaatgcctggatccatgggaagcagaagaggctttctcaccatgtgatgcattctgctatgttatgatacagcaagaagggcctcacaagatgtgacctcttgttcttggacttctcagcctccagaatcatgagagggagtgagagaagtcaaacctctaccagactagacagaatttgcatgtctatctcttacctcccctctttgagccgaaggactagaggaacaaaagactcagccccaaggttatccggcagactaatgagtctgggagccaaaaggaatatgtgatagtgacttttatcactgttcccccgccaaccaggatccaataacaaagctttgccttcattcgtgcaacttggggtctgctactttggaggtcttagttcccaaaagaagatccccttctccagagatagaataataatttcattaagttggaaccggagactgcctcttggccctttgggctactcataccagtgaacaagaggcaaagaggagattactaccctgcacttgctgaaatgacgatcctgattatgaggtggaatcaggattgccacaatatgattactcaggaattaggattgccactgtatgatagaaacaggaaggagtgtgcctgagga

SEQ ID NO: 7416 - protein, 53 aa, Homo sapiens
MRGSERSQTSTRLDRICMSISYLPSLSRRTRGTKDSAPRLSGRLMSLGAKRNM

SEQ ID NO: 7417 - DNA, 815 bp, Homo sapiens
gtgtttttacaagaggcacacaaaagagagacacagagagaagatgagaagactgaggcagacattggaatgacgcaaccaggagccaaggaatgcctggatccatgggaagcagaagaggctttctcaccatgtgatgcattctgctatgttatgatacagcaagaagggcctcacaagatgtgacctcttgttcttggacttctcagcctccagaatcatgagaaaaaaaggctcagcactgtgaagactgattgccacctcccccttccccagcaatctcgtggagatctggtcagagaagctgttccatctcccacaaacctcgtggctcagaagcagaggtggaggctgcagacctcatgtcaggactgggtcgactaaaataaaaacagtccccctagtctggatgccctgtgtaccttgcaactgagaaaatgtgaatgaaaccatgaaatactatgcagccataaaaaggaatgaaattatgtcttttgtaggaacatgaatggagctagaagccattattctcagcaaactaacacaggaacagaaaaccaaacaccacatgttctcacttataagtgggagctgaagaatgagaacccatggacacagggaggggaaaaacacacaggggcctatcagggggtgtggtggggggaaggagagcattggaaaaatagctaatgcatgcttggcttaagttctacgtgataggttgataggtgcagcaaaccaccatggcacacgtttacctatgtaacaaacttgcacatcctgcacatgtaccccagaacttaaaaataaaaatg

SEQ ID NO: 7418 - protein, 38 aa, Homo sapiens
MTQPGAKECLDPWEAEEAFSPCDAFCYVMIQQEGPHKM

SEQ ID NO: 7419 - DNA, 794 bp, Homo sapiens
attctgaagtcagctacctgcttagcaagatgtgtgggcagaaattcatcccgaaagtgacgtggacagacagtcctccgatctatgctggaaatgtcaagggctctggagcttgaccacctgggttcaaatgccaccttcactcatgttaacagtgtggcttgggcaaccgactttacctctctgcacctgtttcttcaatgtgcaaatggaaagaacatcacctgcctcttaggttgttctaaggataaattatatgcaatgcacttagaatacggccagactaaaaggtcatttccagcatttacttttgaactatcaaggcctgattttgaaagactccggactccatgcaaagtgtcttagctacgagctgaattgtgtccctacccctacctttaaattcctatgttgaagtcaaccctcagtacctcagaatgtgactatatgtggagctagggtctttaaagaggtataattaagttaaaataggtcactggggtgggccctaatccagtgtgactggtatccttataagaagagaaaattagggcatagacatatacagaattgaagatgatgtggggatgcaagaagacagtggtcatctataagcaaaggagagaagcctggaagaaccagtcctgccaacatcttgatcttgaacttctagccgccagaactgcaaaaaaaagataagttcctgtcatttaagcttttttctggcaggcctagcaaactaaaaccatctgcattagtcaaggttctccagaaaaactgaaataataagatga

SEQ ID NO: 7420 - protein, 93 aa, Homo sapiens
MLEMSRALELDHLGSNATFTHVNSVAWATDFTSLHLFLQCANGKNITCLLGCSKDKLYAMHLEYGQTKRSFPAFTFELSRPDFERLRTPCKVS

SEQ ID NO: 7421 - DNA, 240 bp, Homo sapiens
tagccatcaacatggagaattccacaagcagatttccacgactgatccatctttgatttgttaaaatgaacctcacttggctgtggtgctatccttttattcattgctagattatctgcgtttggatctactggttacagaaaatctataaaacttttctagttcatacttgtttcatttttattatttctttccttgtttattcattgatttttaattaaaaagacaaataattattgt

SEQ ID NO: 7422 - protein, 36 aa, Homo sapiens
IICVWIYWLQKIYKTFLVHTCFIFIISFLVYSLIFN

SEQ ID NO: 7423 - DNA, 3991 bp, Homo sapiens
atgctggggaagagccatggtagggccactcatggccctcttcctttggcggaccttggaatccaccttccctgcgttaaagtgctccaccaggtgacgccggaagagaagccagcaggcggcggcggcgtcagcatcagcggcctcctgcccgtatctatcgtggcggcgacgggacccgcctccctgggcgccggagtcatgtgacccacacaatggctgagtggctactctcggcttcctggcaacgccgagcgaaagctatgactgcggccgcgggttcggcgggccgcgccgcggtgcccttgctgctgtgtgcgctgctggcgcccggcggcgcgtacgtgctcgacgactccgacgggctgggccgggagttcgacggcatcggcgcggtcagcggcggcggggcaacctcccgacttctagtaaattacccagagccctatcgttctcagatattggattatctctttaagccgaattttggtgcctctttgcatattttaaaagtggaaataggtggtgatgggcagacaacagacggcactgagccctcccacatgcattatgcactagatgagaattatttccgaggatacgagtggtggttgatgaaagaagctaagaagaggaatcccaatattacactcattgggttgccatggtcattccctggatggctgggaaaaggtttcgactggccttatgtcaatcttcagctgactgcctattatgtcgtgacctggattgtgggcgccaagcgttaccatgatttggacattgattatattggaatttggaatgagaggtcatataatgccaattatattaagatattaagaaaaatgctgaattatcaaggtctccagcgagtgaaaatcatagcaagtgataatctctgggagtccatctctgcatccatgctccttgatgccgaactcttcaaggtggttgatgttataggggctcattatcctggaacccattcagcaaaagatgcaaagttgactgggaagaagctttggtcttctgaagactttagcactttaaatagtgacatgggtgcaggctgctggggtcgcattttaaatcagaattatatcaatggctatatgacttccacaatcgcatggaatttagtggctagttactatgaacagttgccttatgggagatgcgggttgatgacggcccaggagccatggagtgggcactacgtggtagaatctcctgtctgggtatcagctcataccactcagtttactcaacctggctggtattacctgaagacagttggccatttagagaaaggaggaagctacgtagctctgactgatggcttagggaacctcaccatcatcattgaaaccatgagtcataaacattctaagtgcatacggccatttcttccttatttcaatgtgtcacaacaatttgccacctttgttcttaagggatcttttagtgaaataccagagctacaggtatggtataccaaacttggaaaaacatccgaaagatttctttttaagcagctggattctctatggctccttgacagcgatggcagtttcacactgagcctgcatgaagatgagctgttcacactcaccactctcaccactggtcgcaaaggcagctacccgcttcctccaaaatcccagcccttcccaagtacctataaggatgatttcaatgttgattacccattttttagtgaagctccaaactttgctgatcaaactggtgtatttgaatattttacaaatattgaagaccctggcgagcatcacttcacgctacgccaagttctcaaccagagacccattacatgggctgccgatgcatccaacacaatcagtattataggagactacaactggaccaatctgactataaagtgtgatgtatacatagagacccctgacacaggaggtgtgttcattgcaggaagagtaaataaaggtggtattttgattagaagtgccagaggaattttcttctggatttttgcaaatggatcttacagggttacaggtgatttagctggatggattatatatgctttaggacgtgttgaagttacagcaaaaaaatggtatacactcacgttaactattaagggtcatttcacctctggcatgctgaatgacaagtctctgtggacagacatccctgtgaattttccaaagaatggctgggctgcaattggaactcactcctttgaatttgcacagtttgacaactttcttgtggaagccacacgctaatacttaacagggcatcatagaatactctggattttcttcccttctttttggttttggttcagagccaattcttgtttcattggaacagtatatgaggcttttgagactaaaaataatgaagagtaaaaggggagagaaatttatttttaatttaccctgtggaagattttattagaattaattccaaggggaaaactggtgaatctttaacattacctggtgtgttccctaacattcaaactgtgcattggccatacccttaggagtggtttgagtagtacagacctcgaagccttgctgctaacactgaggtagctctcttcatcttatttgcaagcggtcctgtagatggcagtaacttgatcatcactgagatgtatttatgcatgctgaccgtgtgtccaagtgagccagtgtcttcatcacaagatgatgctgccataatagaaagctgaagaacactagaagtagctttttgaaaaccacttcaacctgttatgctttatgctctaaaaagtatttttttattttcctttttaagatgatacttttgaaatgcaggatatgatgagtgggatgattttaaaaatgcctctttaataaactacctctaacactatttctgcagtaatagatattagcagattaattgggttatttgcattatttaatttttttgattccaagttttggtcttgtaaccactataactctctgtgaacgtttttccaggtggctggaagaaggaagaaaacctgatatagccaatgctgttgtagtcgtttcctcagcctcatctcactgtgctgtggtctgtcctcacatgtgcactggtaacagactcacacagctgatgaatgcttttctctccttatgtgtggaaggaggggagcacttagacatttgctaactcccagaattggatcatctcctaagatgtacttactttttaaagtccaaatatgtttatatttaaatatacgtgagcgtgttcatcatgttgtatgatttatactaagcattaatgtggctctatgtagcaaatcagttattcatgtaggtaaagtaaatctagaattatttataagaattactcattgaactaattctactatttaggaatttgtaagagtctaacataggcttagctacagtgaagttttgcattgcttttgaagacaagaagataagtgctagaataaataagattacagagaaaattttttgttaaaaccaagtgatttccagctgatgtatctaatattttttaaaacgaacattatagaggtgtaatttatttacaataaaatgttcctactttaaatatacaattcagtgagttttgataaattgatatacccatgtaaccaacactccagtcaagcttcagaatatttccatcaccccagaaggttctcttgtatacctgctcagtcagttcctttcactcccaattgttggcagccattgataggaattctatcactataggttagttttctttgttccagaacatcatgaaagcggcgtcatgtactgtgtattcttatgaatggtttctttccatcagcataatgatttgagatttgtccatgttgtgtgattcagtggtttgttccttcttatttctgaagagttttccattgtatgaatataccacaatttgtttcctccccaccagtttctgatactacaattaaaactgtctacatttacaa

SEQ ID NO: 7424 - protein, 685 aa, Homo sapiens; identical to SEQ ID NO: 1018

SEQ ID NO: 7425 - DNA, 5701 bp, Homo sapiens
gccctggccaaggaggaggctgaaagagcctgagctgtgccctctccattccactgctgtggcagggtcagaaatcttggatagagaaaaccttttgcaaacgggaatgtatctttgtaattcctagcatgaaagactctaacaggtgttgctgtggccagttcaccaaccagcatatcccccctctgccaagtgcaacacccagcaaaaatgaagaggaaagcaaacaggtggagactcagcctgagaaatggtctgttgccaagcacacccagagctacccaacagattcctatggagttcttgaattccagggtggcggatattccaataaagccatgtatatccgtgtatcctatgacaccaagccagactcactgctccatctcatggtgaaagattggcagctggaactccccaagctcttaatatctgtgcatggaggcctccagaactttgagatgcagcccaagctgaaacaagtctttgggaaaggcctgatcaaggctgctatgaccaccggggcctggatcttcaccgggggtgtcagcacaggtgttatcagccacgtaggggatgccttgaaagaccactcctccaagtccagaggccgggtttgtgctataggaattgctccatggggcatcgtggagaataaggaagacctggttggaaaggatgtaacaagagtgtaccagaccatgtccaaccctctaagtaagctctctgtgctcaacaactcccacacccacttcatcctggctgacaatggcaccctgggcaagtatggcgccgaggtgaagctgcgaaggctgctggaaaagcacatctccctgcagaagatcaacacaagactggggcagggcgtgcccctcgtgggtctcgtggtggaggggggccctaacgtggtgtccatcgtcttggaatacctgcaagaagagcctcccatccctgtggtgatttgtgatggcagcggacgtgcctcggacatcctgtcctttgcgcacaagtactgtgaagaaggcggaataataaatgagtccctcagggagcagcttctagttaccattcagaaaacatttaattataataaggcacaatcacatcagctgtttgcaattataatggagtgcatgaagaagaaagaactcgtcactgtgttcagaatgggttctgagggccagcaggacatcgagatggcaattttaactgccctgctgaaaggaacaaacgtatctgctccagatcagctgagcttggcactggcttggaaccgcgtggacatagcacgaagccagatctttgtctttgggccccactggccgcccctgggaagcctggcacccccgacggacagcaaagccacggagaaggagaagaagccacccatggccaccaccaagggaggaagaggaaaagggaaaggcaagaagaaagggaaagtgaaagaggaagtggaggaagaaactgacccccggaagatagagctgctgaactgggtgaatgctttggagcaagcgatgctagatgctttagtcttagatcgtgtcgactttgtgaagctcctgattgaaaacggagtgaacatgcaacactttctgaccattccgaggctggaggagctttataacacaagactgggtccaccaaacacacttcatctgctggtgagggatgtgaaaaagagcaaccttccgcctgattaccacatcagcctcatagacatcgggctcgtgctggagtacctcatgggaggagcctaccgctgcaactacactcggaaaaactttcggaccctttacaacaacttgtttggaccaaagaggcctaaagctcttaaacttctgggaatggaagatgatgagcctccagctaaagggaagaaaaagaaaaagaagaaaaaggaggaagagatcgacattgatgtggacgaccctgccgtgagtcggttccagtatcccttccacgagctgatggtgtgggcagtgctgatgaaacgccagaaaatggcagtgttcctctggcagcgaggggaagagagcatggccaaggccctggtggcctgcaagctctacaaggccatggcccacgagtcctccgagagtgatctggtggatgacatctcccaggacttggataacaattccaaagacttcggccagcttgctttggagttattagaccagtcctataagcatgacgagcagatcgctatgaaactcctgacctacgagctgaaaaactggagcaactcgacctgcctcaaactggccgtggcagccaaacaccgggacttcattgctcacacctgcagccagatgctgctgaccgatatgtggatgggaagactgcggatgcggaagaaccccggcctgaaggttatcatggggattcttctaccccccaccatcttgtttttggaatttcgcacatatgatgatttctcgtatcaaacatccaaggaaaatgaggatggcaaagaaaaagaagaggaaaatacggatgcaaatgcagatgctggctcaagaaagggggatgaggagaacgagcacaaaaaacagagaagtattcccatcggaacaaagatctgtgaattctataacgcgcccattgtcaagttctggttttacacaatatcatacttgggctacctgctgctgtttaactacgtcatcctggtgcggatggatggctggccgtccctccaggagtggatcgtcatctcctacatcgtgagcctggcgttagagaagatacgagagatcctcatgtcagaaccaggcaaactcagccagaaaatcaaagtttggcttcaggagtactggaacatcacagatctcgtggccatttccacattcatgattggagcaattcttcgcctacagaaccagccctacatgggctatggccgggtgatctactgtgtggatatcatcttctggtacatccgtgtcctggacatctttggtgtcaacaagtatctggggccatacgtgatgatgattggaaagatgatgatcgacatgctgtactttgtggtcatcatgctggtcgtgctcatgagtttcggagtagcccgtcaagccattctgcatccagaggagaagccctcttggaaactggcccgaaacatcttctacatgccctactggatgatctatggagaggtgtttgcagaccagatagacctctacgccatggaaattaatcctccttgtggtgagaacctatatgatgaggagggcaagcggcttcctccctgtatccccggcgcctggctcactccagcactcatggcgtgctatctactggtcgccaacatcctgctggtgaacctgctgattgctgtgttcaacaataccttctttgaagtaaaatcaatatccaaccaggtgtggaagttccagcgatatcagctgattatgacatttcatgacaggccagtcctgcccccaccgatgatcattttaagccacatctacatcatcattatgcgtctcagcggccgctgcaggaaaaagagagaaggggaccaagaggaacgggatcgtggattgaagctcttccttagcgacgaggagctaaagaggctgcatgagttcgaggagcagtgcgtgcaggagcacttccgggagaaggaggatgagcagcagtcgtccagcgacgagcgcatccgggtcacttctgaaagagttgaaaatatgtcaatgaggttggaagaaatcaatgaaagagaaacttttatgaaaacttccctgcagactgttgaccttcgacttgctcagctagaagaattatctaacagaatggtgaatgctcttgaaaatcttgcgggaatcgacaggtctgacctgatccaggcacggtcccgggcttcttctgaatgtgaggcaacgtatcttctccggcaaagcagcatcaatagcgctgatggctacagcttgtatcgatatcattttaacggagaagagttattatttgaggatacatctctctccacgtcaccagggacaggagtcaggaaaaaaacctgttccttccgtataaaggaagagaaggacgtgaaaacgcacctagtcccagaatgtcagaacagtcttcacctttcactgggcacaagcacatcagcaaccccagatggcagtcaccttgcagtagatgacttaaagaacgctgaagagtcaaaattaggtccagatattgggatttcaaaggaagatgatgaaagacagacagactctaaaaaagaagaaactatttccccaagtttaaataaaacagatgtgatacatggacaggacaaatcagatgttcaaaacactcagctaacagtggaaacgacaaatatagaaggcactatttcctatcccctggaagaaaccaaaattacacgctatttccccgatgaaacgatcaatgcttgtaaaacaatgaagtccagaagcttcgtctattcccggggaagaaagctggtcggtggggttaaccaggatgtagagtacagttcaatcacggaccagcaattgacgacggaatggcaatgccaagttcaaaagatcacgcgctctcatagcacagatattccttacattgtgtcggaagctgcagtgcaagctgagcataaagagcagtttgcagatatgcaagatgaacaccatgtcgctgaagcaattcctcgaatccctcgcttgtccctaaccattactgacagaaatgggatggaaaacttactgtctgtgaagccagatcaaactttgggattcccatctctcaggtcaaaaagtttacatggacatcctaggaatgtgaaatccattcagggaaagttagacagatctggacatgccagtagtgtaagcagcttagtaattgtgtctggaatgacagcagaagaaaaaaaggttaagaaagagaaagcttccacagaaactgaatgctagtctgttttgtttctttaatttttttttttaacagtcagaaccactaatgggtgtcatcttggccatctaaacatcatcaatttctaaaaacattttccttaaaaaattttggaaattcagacttgatttacaatttaatgcactaaaagtagtattttgttagcatatgttagtaggcttagttttttcagttgcagtagtatcaaatgaaagtgatgatactgtaacgaagataaattggctaatcagtatacaagattatacaatctctttattactgagggccaccaaatagcctaggaagtgccctcgagcactgaagtcaccattaggtcacttaagaagtaagcaactagctgggcacagtggctcatgcctgtaatcctagcactttgggaggccaaggcagaaagatagcttgagtccaggagtttgagaccagcctgggcaacatagtgataccccatctcttaaaaaaaaaaaaaaaagtaagcaactgtgtaagaaagagaaactaaagagaaagcaaacatgaaaaaagggaggggtggaaagaagaaaaataaaattgtgaggcacaataagtgggaaggagccacaaatatgtttttatggggtctttgttttctgttttaatgttttattttaaactacacaatgggaaaaaaagtacacaattatatcaaacatcatactctaataatttagggtgacctagagttttgttaatgtgcaaaaataaagtatccaatatgcatttt

SEQ ID NO: 7426 - protein, 1603 aa, Homo sapiens; identical to SEQ ID NO: 1020

SEQ ID NO: 7427 - DNA, 245 bp, Homo sapiens
gttgacacatctaaaagaatctttgtttccaactggactgactcattgagaggaaaccttcactgcacctcaccagtgcagacagaagacctggaggcaggacgggaggcattttatacttcagcacgatatgggccctgacttttcattttctacatggagacatattgctggaggctcatcatcctgaggggagaaacatggatttcatggttttgccataaaagtatgcaacaaagagttcc

SEQ ID NO: 7428 - protein, 46 aa, Homo sapiens
VDTSKRIFVSNWTDSLRGNLHCTSPVQTEDLEAGREAFYTSARYGP

SEQ ID NO: 7429 - DNA, 656 bp, Homo sapiens
tatagatttaacttgccttgttttgttctcttgcattttctttgaacagaataataaatgagtccctcagggagcagcttctagttaccattcagaaaacatttaattataataaggcacaatcacatcagctgtttgcaattataatggagtgcatgaagaagaaagaactcgtcactgtgttcagaatgggttctgagggccagcaggacatcgagatggcaattttaactgccctgctgaaaggaacaaacgtatctgctccagatcagctgagcttggcactggcttggaaccgcgtggacatagcacgaagccagatctttgtctttgggccccactggccggtgaaactgttttttttcgattcatatcattgatcttgactttgtacaagtgacctattagtatgttctcccttgtgacatggaattcaggaaattatgtggggtttctgatgatatgatatgtaatctattaggctcattagaagatgtcactgtttaacttcaaagaaccaacaagaagtaattccacattcaaaccagtactcctgaagaaattaatcaccaaatattttatcgttgctgatgaaagtgggtttttacctttttaaagaaaaagaagaagaaataaaatagcttattaaaatttaa

SEQ ID NO: 7430 - protein, 77 aa, Homo sapiens
MECMKKKELVTVFRMGSEGQQDIEMAILTALLKGTNVSAPDQLSLALAWNRVDIARSQIFVFGPHWPVKLFFFDSYH

SEQ ID NO: 7431 - DNA, 1634 bp, Homo sapiens
gccctggccaaggaggaggctgaaagagcctgagctgtgccctctccattccactgctgtggcagggtcagaaatcttggatagagaaaaccttttgcaaacgggaatgtatctttgtaattcctagcatgaaagactctaacaggtgttgctgtggccagttcaccaaccagcatatcccccctctgccaagtgcaacacccagcaaaaatgaagaggaaagcaaacaggtggagactcagcctgagaaatggtctgttgccaagcacacccagagctacccaacagattcctatggagttcttgaattccagggtggcggatattccaataaagccatgtatatccgtgtatcctatgacaccaagccagactcactgctccatctcatggtgaaagattggcagctggaactccccaagctcttaatatctgtgcatggaggcctccagaactttgagatgcagcccaagctgaaacaagtctttgggaaaggcctgatcaaggctgctatgaccaccggggcctggatcttcaccgggggtgtcagcacaggtgttatcagccacgtaggggatgccttgaaagaccactcctccaagtccagaggccgggtttgtgctataggaattgctccatggggcatcgtggagaataaggaagacctggttggaaaggatgtaacaagagtgtaccagaccatgtccaaccctctaagtaagctctctgtgctcaacaactcccacacccacttcatcctggctgacaatggcaccctgggcaagtatggcgccgaggtgaagctgcgaaggctgctggaaaagcacatctccctgcagaagatcaacacaagactggggcagggcgtgcccctcgtgggtctcgtggtggaggggggccctaacgtggtgtccatcgtcttggaatacctgcaagaagagcctcccatccctgtggtgatttgtgatggcagcggacgtgcctcggacatcctgtcctttgcgcacaagtactgtgaagaaggcggaataataaatgagtccctcagggagcagcttctagttaccattcagaaaacatttaattataataaggcacaatcacatcagctgtttgcaattataatggagtgcatgaagaagaaagaactcgtcactgtgttcagaatgggttctgagggccagcaggacatcgagatggcaattttaactgccctgctgaaaggaacaaacgtatctgctccagatcagctgagcttggcactggcttggaaccgcgtggacatagcacgaagccagatctttgtctttgggccccactggccggtgaaactgttttttttcgattcatatcattgatcttgactttgtacaagtgacctattagtatgttctcccttgtgacatggaattcaggaaattatgtggggtttctgatgatatgatatgtaatctattaggctcattagaagatgtcactgtttaacttcaaagaaccaacaagaagtaattccacattcaaaccagtactcctgaagaaattaatcaccaaatattttatcgttgctgatgaaagtgggtttttacctttttaaagaaaaagaagaagaaataaaatagcttattaaaatttaa

SEQ ID NO: 7432 - protein, 409 aa, Homo sapiens [sequence omitted]

SEQ ID NO: 7433 - DNA, 991 bp, Homo sapiens
tccctgccctggccaaggaggaggctgaaagagcctgagctgtgccctctccattccactgctgtggcagggtcagaaatcttggatagagaaaaccttttgcaaacgggaatgtatctttgtaattcctagcatgaaagactctaacaggtgttgctgtggccagttcaccaaccagcatatcccccctctgccaagtgcaacacccagcaaaaatgaagaggaaagcaaacaggtggagactcagcctgagaaatggtctgttgccaagcacacccagagctacccaacagattcctatggagttcttgaattccagggtggcggatattccaataaagccatggtgagaaaggcattcagacatggtgccactaggatcacagctttcattggcggccagtctcccagccccaaactgcagatacctggtcttcttcatggctgtggctcaatcttcctagatatttcattgaaaaaccaagagatatatctgtgcacatggcttttagccatgaggcttggaaactggacaccactgtaaagaacatctagtgtcccgtaaatccataccaaagctctgaatccacaaaccaggctctggcccaaccctgcaaacacactccattgctccatcttcagtaaaggaagacaaattcatttttctaataactgtggacctgcagcccccttagatgtgttgagagtctttggaaatattttcctctgaggtctgtccacagcttccctgggcctgcgctcagctggcccgagaaggaccaaggtccctcacatttgcatgtaaacagggagtgccctctgcccttccagtgagccctgccagcgtgggggaggcttcagctctgtgatccgttccagctcactctgaattacactcctacatgcccagtcacagactttttgcaatttcattttatttcactggcccaacatcattgttaaaataaaatttagctgtgttccaaatgct

SEQ ID NO: 7434 - protein, 136 aa, Homo sapiens
MKDSNRCCCGQFTNQHIPPLPSATPSKNEEESKQVETQPEKWSVAKHTQSYPTDSYGVLEFQGGGYSNKAMVRKAFRHGATRITAFIGGQSPSPKLQIPGLLHGCGSIFLDISLKNQEIYLCTWLLAMRLGNWTPL

SEQ ID NO: 7435 - DNA, 453 bp, Homo sapiens
gcaataaatgttattgctgcaagcagaaagtgtctgggttggcaccacctttaagagctgtaacactgactgtacggtatgtggcttcactcctgaagtcagcaagcccacgaacacacctggaaagacgagcaactctggatgcgccacctttaagagctgtaacacctgctgcgggtattgacatttggcccccccgagcgggagatcagtgtttgcctaccagaagtctggtggcagaattgcgtggaagctgctggcgcctctgtgaggcagtggggctcccagcactttcttggctgatgggcagttctagatttagggtgaggcaagtgaggcactcaaatgggggtatcagaaatccagtaattaggataagtaacatttaatgccatatttttaaaaaacaaaaatcaatacagaaaattcgtgatgaatacagtgtggaaactg

SEQ ID NO: 7436 - protein, 58 aa, Homo sapiens
MLLLQAESVWVGTTFKSCNTDCTVCGFTPEVSKPTNTPGKTSNSGCATFKSCNTCCGY

SEQ ID NO: 7437 - DNA, 531 bp, Homo sapiens
ctcgttgttaaccttatgagctctggagtcaggctcaaattctgacttctgtacttagtagctgtgtgatcctgggcaggctacttaacctctctgtgccttaggcgcctcatctgaaaaatgcgagtaatagtaataaactttactgaggttcgtggtgattaaattaatatttgcaaagtgctcagaactagatcttggcatttgatgaatactgattacccattaattctttttatgatatcctgaccccgtttcttccatacaaagcaggttaacatgcatccgtgcatgttggtatgtgcccagaactgtacacacgcacccattaacaatggctgcctggaagtaggggtaagaaggaagtgtgagtatccatgtccctttgtgatagatttatttgtgaattactgtaacttcctacatcaggcactgacacttgtggacaggtgggtaggtaataggtagtagctatacagcacggtcattcagtgaacaagtgctctcatctggaagcgcacacgcctccgg

SEQ ID NO: 7438 - protein, 62 aa, Homo sapiens
MHPCMLVCAQNCTHAPINNGCLEVGVRRKCEYPCPFVIDLFVNYCNFLHQALTLVDRWVGNR

SEQ ID NO: 7439 - DNA, 826 bp, Homo sapiens
gcacagagcctgcctgttggtctctacccacaggggatcccctgctgctccaccatcagatttgggacaccaccccccccccggccccaccagagggcatcagctatgcctagcaattacgcccccgtggctaaattaaactcccattggctaaattaggctcgaagagaggggcacctgctgctaagctgtgtatgttgtcccctaggactcccaccgtttgctgagctccacatgacaacagcagacgacaggccgcactgatcccacctggcttacaggtgctgtcacacagactagaacattggagaatttctggaagatataaagcggaggagatcagattcgtggtgaaacgcaatagagccaatggcctgcagggtaaagtctgagtgcagcattcagactgaagacaaagatgcaccgggagcctccagagccaacactggcccaaagagagaagcaggggcccgcccaggtgactgccaggcactgtcagccacactgacagggagagcggcccagatgagaggcccaggaaggcactctgcctttgcaacgtcctggcctgtctccatgaccacaggtgcccagtggtgccagggttgccagacagtggtggtttagttgtgtgcaagaactactctgcacagcaagaatgattggttgagactgacagatcgcaaacacactgcattcaggaacccttcaccctctcttagaaatggctgagggtctcagcgggctttcattcatatgagtttatctatcaatatttacggtagtagaagttcaagtgaaaaataaataaatattcatttatctt

SEQ ID NO: 7440 - protein, 85 aa, Homo sapiens
MACRVKSECSIQTEDKDAPGASRANTGPKREAGARPGDCQALSATLTGRAAQMRGPGRHSAFATSWPVSMTTGAQWCQGCQTVVV

SEQ ID NO: 7441 - DNA, 801 bp, Homo sapiens
ctcctgggtacaccagccagcccacggcacagagcctgcctgttggtctctacccacaggggatcccctgctgctccaccatcagatttgggacaccaccccccccccggccccaccagagggcatcagctatgcctagcaattacgcccccgtggctaaattaaactcccattggctaaattaggctcgaagagaggggcacctgctgctaagctgtgtatgttgtcccctaggactcccaccgtttgctgagctccacatgacaacagcagacgacaggccgcactgatcccacctggcttacaggtgctgtcacacaggtacgccttcttgtgaatcatcagtcaccatttgcccctcgcagcaaccctgtcttggaggaaggtccttgccgacacccgcctctccccacccttaggctcccttgctccttcattcaaccattgtttacatgtcgttcaggactgctgactaaacactttcaagcacagtggacccttgaacaacgcaggttcaaactgtgcaggtccacccacagggatgtttttcaatcagagttataccaagtgtccctgcctctcctgcctcccttcccacttcctccatgtcttcctctctgccaccctgaggcagcaagaccagcccctcctcctcagccactcaacatgaagacaacgaggatgaagacttctatgataatccacttccacttagtaaatgctttctcttatgatattcttaatgacattttattttcccaagcttagtttattgtaagaatacagtataaatacacatac

SEQ ID NO: 7442 - protein, 42 aa, Homo sapiens
MFFNQSYTKCPCLSCLPSHFLHVFLSATLRQQDQPLLLSHST

SEQ ID NO: 7443 - DNA, 1030 bp, Homo sapiens
gtttgaaagaaggatgagcaggctctctgccatctgcccaccaacttttcaagttacttttacccaccttcaaaattacatctgcttttagcaagaattactgatgtgataaagatgggagtgttcaccatgcaagggcaggggatcccctgctgctccaccatcagatttgggacaccaccccccccccggccccaccagagggcatcagctatgcctagaaggggaccacaacagactcgacaggatccaccggttgggcccaaggcaggaggaagggcggcgcccccaaactcccaggacgcctgcagcaccccccacgcgccgctctccgcctctggggagcatcctgccaccccccgacacacacaccccggctacatcccgccttctcacgcttggtcaggcgctctggagatgtcggagatccaggcttttcctaaagagtcaggattggaaggcggactcccaccgtttgctgagctccacatgacaacagcagacgacaggccgcactgatcccacctggcttacaggtgctgtcacacaggtacgccttcttgtgaatcatcagtcaccatttgcccctcgcagcaaccctgtcttggaggaaggtccttgccgacacccgcctctccccacccttaggctcccttgctccttcattcaaccattgtttacatgtcgttcaggactgctgactaaacactttcaagcacagtggacccttgaacaacgcaggttcaaactgtgcaggtccacccacagggatgtttttcaatcagagttataccaagtgtccctgcctctcctgcctcccttcccacttcctccatgtcttcctctctgccaccctgaggcagcaagaccagcccctcctcctcagccactcaacatgaagacaacgaggatgaagacttctatgataatccacttccacttagtaaatgctttctcttatgatattcttaatgacattttattttcccaagcttagtttattgtaagaatacagtataaatacacatac

SEQ ID NO: 7444 - protein, 134 aa, Homo sapiens; identical to SEQ ID NO: 1022

SEQ ID NO: 7445 - DNA, 648 bp, Homo sapiens
gggtacaccagccagcccacggcacagagcctgcctgttggtctctacccacaggggatcccctgctgctccaccatcagatttgggacaccaccccccccccggccccaccagagggcatcagctatgcctagcaattacgcccccgtggctaaattaaactcccattggctaaattaggctcgaagagaggggcacctgctgctaagctgtgtatgttgtcccctaggactcccaccgtttgctgagctccacatgacaacagcagacgacaggccgcactgatcccacctggcttacaggtgctgtcacacaggactgctgactaaacactttcaagcacagtggacccttgaacaacgcaggttcaaactgtgcaggtccacccacagggatgtttttcaatcagagttataccaagtgtccctgcctctcctgcctcccttcccacttcctccatgtcttcctctctgccaccctgaggcagcaagaccagcccctcctcctcagccactcaacatgaagacaacgaggatgaagacttctatgataatccacttccacttagtaaatgctttctcttatgatattcttaatgacattttattttcccaagcttagtttattgtaagaatacagtataaatac

SEQ ID NO: 7446 - protein, 42 aa, Homo sapiens; identical to SEQ ID NO: 7442

SEQ ID NO: 7447 - DNA, 745 bp, Homo sapiens
tgagcaggctctctgccatctgcccaccaacttttcaagttacttttacccaccttcaaaattacatctgcttttagcaagaattactgatgtgataaagatgggagtgttcaccatgcaagggcaggggatcccctgctgctccaccatcagatttgggacaccaccccccccccggccccaccagagggcatcagctatgcctagcaattacgcccccgtggctaaattaaactcccattggctaaattaggctcgaagagaggggcacctgctgctaagctgtgtatgttgtcccctaggactcccaccgtttgctgagctccacatgacaacagcagacgacaggccgcactgatcccacctggcttacaggtgctgtcacacaggctcccttgctccttcattcaaccattgtttacatgtcgttcaggactgctgactaaacactttcaagcacagtggacccttgaacaacgcaggttcaaactgtgcaggtccacccacagggatgtttttcaatcagagttataccaagtgtccctgcctctcctgcctcccttcccacttcctccatgtcttcctctctgccaccctgaggcagcaagaccagcccctcctcctcagccactcaacatgaagacaacgaggatgaagacttctatgataatccacttccacttagtaaatgctttctcttatgatattcttaatgacattttattttcccaagcttagtttattg

SEQ ID NO: 7448 - protein, 50 aa, Homo sapiens
MGVFTMQGQGIPCCSTIRFGTPPPPRPHQRASAMPSNYAPVAKLNSHWLN

SEQ ID NO: 7449 - DNA, 341 bp, Homo sapiens
ggcaaatccagaatctgcagcgtgggccagcaggctgaagacgcaggagagctaatggtgcagaagctgatgtcagtttcacaaggttgacatgcgacaatcacagaaggtccacgtcagaagaggcttcatcaatccccagtcaatcccaggctctcactggacccaggacaaagaggagaccaaaggaagggctgctccagcagcaccaccagcacccacatgggaatgggggcatccgtccaccacccagcagagatggagggacttgctgcagggcttctgcatcagaggggaccctcatggctctgttgttaccatggtaacaaaggggccacaga

SEQ ID NO: 7450 - protein, 82 aa, Homo sapiens
MRQSQKVHVRRGFINPQSIPGSHWTQDKEETKGRAAPAAPPAPTWEWGHPSTTQQRWRDLLQGFCIRGDPHGSVVTMVTKGP

SEQ ID NO: 7451 - DNA, 451 bp, Homo sapiens
tgaacaacgtggagaccttgaagtgcgccctccagctggctctggaccggcaccaggctcgggagagggcaggggcctgaccaaggcaggaagcggaggactgtgacagagaggagacacactgctcatggtcagggcttgtagagggaggagcgatggggactctgtgcaggatctgcttcccttctctccaggacctgcctcgaggtgccccaggccccggaaagctcttgcagaattgcagcttggactggggcagggctctccttgtgtgtttttggagaagatgggcagtagatcgctccagggactcttggggattaggtacgagggagtgtgggggaatttatcttaaacaggcttgtttacttctgttgaccaggaactgacctttgatcatctacgcccatgaccttccctgaaaggggaacaataaatgttaattacctcc

SEQ ID NO: 7452 - protein, 77 aa, Homo sapiens [sequence omitted]

SEQ ID NO: 7453 - DNA, 3100 bp, Homo sapiens
agcagtttgtgcaaccagaggagcgcaggcagggttccctgctggggcccgggctgcccagccatgctttgggcactctggccaaggtggctggcagacaagatgctgcccctcctgggggcagtgctgcttcagaagagagagaagaggggccctctgtggaggcactggcggcgggaaacctacccatactatgacctccaggtgaaggtgctgagggccacaaacatccggggcacagacctgctgtccaaagccgactgctatgtgcaactgtggctgcccacggcgtccccaagccctgcccagactaggatagtggccaactgcagtgaccccgagtggaatgagaccttccactaccagatccatggtgctgtgaagaacgtcctggagctcaccctctatgacaaggacatcctgggcagcgaccagctctctctgctcctgtttgacctgagaagcctcaagtgtggccaacctcacaaacacaccttcccactcaaccaccaggattcacaagagctgcaggtggaatttgttctggagaagagccaggtgcctgcatctgaagtcatcaccaacggggttctggtggctcacccctgtctgagaatccagggcacgctccggggagatgggacagccccacgggaagagtacggctctaggcagctccagctggcagtgcctggagcctacgagaagccacagctcttgcccctgcagcctcccacagagccaggcctcccacccacctttaccttccacgtgaacccagtgctgagctccaggctacacgtggagctgatggagctgctggcagctgtgcagagtggccccagcgcagagttggaggctcagaccagcaagctgggcgaggggggcatcctgctctcctctctgcccctaggccaggaggaacagtgttctgtggccctgggggagggccaggaggtggctctgagcatgaaggtggaaatgagctccggggacctagacctacgccttggctttgacctctctgacggggagcaggagtttctggacaggaggaagcaggtcgtgtccaaggccctgcagcaagtgctgggattgagtgaggctctggacagtggccaggtgcctgtagtggctgtgttgggttccgggggtggaacccgagccatgtcttctctgtacggcagcctggcagggttgcaggagctcggccttctagacactgtgacctacctgagtggggtctctgggtctacctggtgcatctccacactctacagggacccagcctggtcccaggtggccttgcagggccccattgagcgtgcccaggttcacgtctgcagcagtaagatgggagctttgtccacggagcggctacagtactacactcaggaactgggggtccgggagcgcagtggccacagcgtgtccctcatcgacctctggggcctccttgttgagtatctcctgtaccaggaggagaaccctgccaagctgtctgaccaacaggaggcggtccgccagggtcagaacccttaccccatttacaccagtgtcaacgtccgcaccaacttgagtggggaagattttgcagagtggtgcgagttcacgccctatgaggttggcttccccaagtacggggcttatgttcccaccgagctcttcggctcagaactcttcatgggacgattgctgcagctccagcctgaaccccggatctgttacctgcaaggtatgtggggcagcgcctttgccaccagcctggatgagatcttcctaaagaccgccggctcgggcctcagcttcctggagtggtacagaggcagtgtgaatatcacagacgactgccagaagcctcagctgcacaacccctcgaggctgcgaacgaggctcctcaccccacaggggcccttctcccaggctgtgctggacatattcacctcccgcttcacttccgcccagagctttaacttcacccggggtctctgcttgcacaaggactatgtggctggcagggagttcgtggcctggaaagacacacacccggacgccttccccaaccagctcacccccatgcgggactgcctgtacctggtggacggaggctttgccatcaactctccgttcccactggctctgctgcctcagagagcagtggacctcattctgtcctttgactattccttggaagccccttttgaggtcttgaagatgacagagaagtactgcctggaccgaggaatccccttccctagcatcgaggtgggccctgaggacatggaggaggcccgtgagtgctatctgtttgccaaggctgaggacccccgctcccccattgtgctgcacttccccctggttaaccgtaccttccgcacacacctggccccaggtgtggagcgacaaacagctgaggagaaggcctttggggactttgtcatcaacaggccagacaccccctatggcatgatgaacttcacctatgagccccaggacttttatcggctggtggccctcagtcgatacaacgtcctgaacaacgtggagaccttgaagtgcagcccaccccagacacagaaggacctcagagggcccaagtcctcagacccacacagaacaggggctgagggcactgagaagccagctgtcctccttacactgagatggaaagcagagatgcatccatccacacttcctgcagagcggcccaagccccaaccccacctcgagctcctggatgcactgctatcaagaacaatgaggggctgaggggatggccagcctatgttgctgactccatcatcctaaccctccttctgccttctggtctcctcgtgcctcctcccagatcacccttctcttcccagcgccctaaagcctgtggggtgatgtcccattctggctgctccaggtgggagatgtgcgcgtgtctccctgccagttacccaggcttcactcttcgaacctggaccacagtctctggtgatgtgtgtagtggccacatcatgcaaatatagtctcaccattcctaggagctaaatgggtgtgtctagtaggggcatcagttcatcgggggagaggtgtgcacctgtatgtgggg

SEQ ID NO: 7454 - protein, 901 aa, Homo sapiens
MLWALWPRWLADKMLPLLGAVLLQKREKRGPLWRHWRRETYPYYDLQVKVLRATNIRGTDLLSKADCYVQLWLPTASPSPAQTRIVANCSDPEWNETFHYQIHGAVKNVLELTLYDKDILGSDQLSLLLFDLRSLKCGQPHKHTFPLNHQDSQELQVEFVLEKSQVPASEVITNGVLVAHPCLRIQGTLRGDGTAPREEYGSRQLQLAVPGAYEKPQLLPLQPPTEPGLPPTFTFHVNPVLSSRLHVELMELLAAVQSGPSAELEAQTSKLGEGGILLSSLPLGQEEQCSVALGEGQEVALSMKVEMSSGDLDLRLGFDLSDGEQEFLDRRKQVVSKALQQVLGLSEALDSGQVPVVAVLGSGGGTRAMSSLYGSLAGLQELGLLDTVTYLSGVSGSTWCISTLYRDPAWSQVALQGPIERAQVHVCSSKMGALSTERLQYYTQELGVRERSGHSVSLIDLWGLLVEYLLYQEENPAKLSDQQEAVRQGQNPYPIYTSVNVRTNLSGEDFAEWCEFTPYEVGFPKYGAYVPTELFGSELFMGRLLQLQPEPRICYLQGMWGSAFATSLDEIFLKTAGSGLSFLEWYRGSVNITDDCQKPQLHNPSRLRTRLLTPQGPFSQAVLDIFTSRFTSAQSFNFTRGLCLHKDYVAGREFVAWKDTHPDAFPNQLTPMRDCLYLVDGGFAINSPFPLALLPQRAVDLILSFDYSLEAPFEVLKMTEKYCLDRGIPFPSIEVGPEDMEEARECYLFAKAEDPRSPIVLHFPLVNRTFRTHLAPGVERQTAEEKAFGDFVINRPDTPYGMMNFTYEPQDFYRLVALSRYNVLNNVETLKCSPPQTQKDLRGPKSSDPHRTGAEGTEKPAVLLTLRWKAEMHPSTLPAERPKPQPHLELLDALLSRTMRG

SEQ ID NO: 7455 - DNA, 3526 bp, Homo sapiens
atgactttattgtgcagtggggccgatgacttccagaagaggatgtgctgcctgtcacacctgagccagcagtttgtgcaaccagaggagcgcaggcagggttccctgctggggcccgggctgcccagccatgctttgggcactctggccaaggtggctggcagacaagatgctgcccctcctgggggcagtgctgcttcagaagagagagaagaggggccctctgtggaggcactggcggcgggaaacctacccatactatgacctccaggtgaaggtgctgagggccacaaacatccggggcacagacctgctgtccaaagccgactgctatgtgcaactgtggctgcccacggcgtccccaagccctgcccagactaggatagtggccaactgcagtgaccccgagtggaatgagaccttccactaccagatccatggtgctgtgaagaacgtcctggagctcaccctctatgacaaggacatcctgggcagcgaccagctctctctgctcctgtttgacctgagaagcctcaagtgtggccaacctcacaaacacaccttcccactcaaccaccaggattcacaagagctgcaggtggaatttgttctggagaagagccaggtgcctgcatctgaagtcatcaccaacggggttctggtggctcacccctgtctgagaatccagggcacgctccggggagatgggacagccccacgggaagagtacggctctaggcagctccagctggcagtgcctggagcctacgagaagccacagctcttgcccctgcagcctcccacagagccaggcctcccacccacctttaccttccacgtgaacccagtgctgagctccaggctacacgtggagctgatggagctgctggcagctgtgcagagtggccccagcgcagagttggaggctcagaccagcaagctgggcgaggggggcatcctgctctcctctctgcccctaggccaggaggaacagtgttctgtggccctgggggagggccaggaggtggctctgagcatgaaggtggaaatgagctccggggacctagacctacgccttggctttgacctctctgacggggagcaggagtttctggacaggaggaagcaggtcgtgtccaaggccctgcagcaagtgctgggattgagtgaggctctggacagtggccaggtgcctgtagtggctgtgttgggttccgggggtggaacccgagccatgtcttctctgtacggcagcctggcagggttgcaggagctcggccttctagacactgtgacctacctgagtggggtctctgggtctacctggtgcatctccacactctacagggacccagcctggtcccaggtggccttgcagggccccattgagcgtgcccaggttcacgtctgcagcagtaagatgggagctttgtccacggagcggctacagtactacactcaggaactgggggtccgggagcgcagtggccacagcgtgtccctcatcgacctctggggcctccttgttgagtatctcctgtaccaggaggagaaccctgccaagctgtctgaccaacaggaggcggtccgccagggtcagaacccttaccccatttacaccagtgtcaacgtccgcaccaacttgagtggggaagattttgcagagtggtgcgagttcacgccctatgaggttggcttccccaagtacggggcttatgttcccaccgagctcttcggctcagaactcttcatgggacgattgctgcagctccagcctgaaccccggatctgttacctgcaaggtatgtggggcagcgcctttgccaccagcctggatgagatcttcctaaagaccgccggctcgggcctcagcttcctggagtggtacagaggcagtgtgaatatcacagacgactgccagaagcctcagctgcacaacccctcgaggctgcgaacgaggctcctcaccccacaggggcccttctcccaggctgtgctggacatattcacctcccgcttcacttccgcccagagctttaacttcacccggggtctctgcttgcacaaggactatgtggctggcagggagttcgtggcctggaaagacacacacccggacgccttccccaaccagctcacccccatgcgggactgcctgtacctggtggacggaggctttgccatcaactctccgttcccactggctctgctgcctcagagagcagtggacctcattctgtcctttgactattccttggaagccccttttgaggtcttgaagatgacagagaagtactgcctggaccgaggaatccccttccctagcatcgaggtgggccctgaggacatggaggaggcccgtgagtgctatctgtttgccaaggctgaggacccccgctcccccattgtgctgcacttccccctggttaaccgtaccttccgcacacacctggccccaggtgtggagcgacaaacagctgaggagaaggcctttggggactttgtcatcaacaggccagacaccccctatggcatgatgaacttcacctatgagccccaggacttttatcggctggtggccctcagtcgatacaacgtcctgaacaacgtggagaccttgaagtgcgccctccagctggctctggaccggcaccaggctcgggagagggcaggggcctgaccaaggcaggaagcggaggactgtgacagagaggagacacactgctcatggtcagggcttgtagagggaggagcgatggggactctgtgcaggatctgcttcccttctctccaggacctgcctcgaggtgccccaggccccggaaagctcttgcagaattgcagcttggactggggcagggctctccttgtgtgtttttggagaagatgggcagtagatcgctccagggactcttggggatgtagggcagaagagaacagcactcatttcacagcggggtgtggagagaatcaggtgagccacagagcccaccccagacacagaaggacctcagagggcccaagtcctcagacccacacagaacaggggctgagggcactgagaagccagctgtcctccttacactgagatggaaagcagagatgcatccatccacacttcctgcagagcggcccaagccccaaccccacctcgagctcctggatgcactgctatcaagaacaatgaggggctgaggggatggccagcctatgttgctgactccatcatcctaaccctccttctgccttctggtctcctcgtgcctcctcccagatcacccttctcttcccagcgccctaaagcctgtggggtgatgtcccattctggctgctccaggtgggagatgtgcgcgtgtctccctgccagttacccaggcttcactcttcgaacctggaccacagtctctggtgatgtgtgtagtggccacatcatgcaaatatagtctcaccattcctaggagctaaatgggtgtgtctagtaggggcatcagttcatcgggggagaggtgtgcacctgtatgtgggg

SEQ ID NO: 7456 - protein, 849 aa, Homo sapiens
MLWALWPRWLADKMLPLLGAVLLQKREKRGPLWRHWRRETYPYYDLQVKVLRATNIRGTDLLSKADCYVQLWLPTASPSPAQTRIVANCSDPEWNETFHYQIHGAVKNVLELTLYDKDILGSDQLSLLLFDLRSLKCGQPHKHTFPLNHQDSQELQVEFVLEKSQVPASEVITNGVLVAHPCLRIQGTLRGDGTAPREEYGSRQLQLAVPGAYEKPQLLPLQPPTEPGLPPTFTFHVNPVLSSRLHVELMELLAAVQSGPSAELEAQTSKLGEGGILLSSLPLGQEEQCSVALGEGQEVALSMKVEMSSGDLDLRLGFDLSDGEQEFLDRRKQVVSKALQQVLGLSEALDSGQVPVVAVLGSGGGTRAMSSLYGSLAGLQELGLLDTVTYLSGVSGSTWCISTLYRDPAWSQVALQGPIERAQVHVCSSKMGALSTERLQYYTQELGVRERSGHSVSLIDLWGLLVEYLLYQEENPAKLSDQQEAVRQGQNPYPIYTSVNVRTNLSGEDFAEWCEFTPYEVGFPKYGAYVPTELFGSELFMGRLLQLQPEPRICYLQGMWGSAFATSLDEIFLKTAGSGLSFLEWYRGSVNITDDCQKPQLHNPSRLRTRLLTPQGPFSQAVLDIFTSRFTSAQSFNFTRGLCLHKDYVAGREFVAWKDTHPDAFPNQLTPMRDCLYLVDGGFAINSPFPLALLPQRAVDLILSFDYSLEAPFEVLKMTEKYCLDRGIPFPSIEVGPEDMEEARECYLFAKAEDPRSPIVLHFPLVNRTFRTHLAPGVERQTAEEKAFGDFVINRPDTPYGMMNFTYEPQDFYRLVALSRYNVLNNVETLKCALQLALDRHQARERAGA

SEQ ID NO: 7457 - DNA, 3322 bp, Homo sapiens
gcagtttgtgcaaccagaggagcgcaggcagggttccctgctggggcccgggctgcccagccatgctttgggcactctggccaaggtggctggcagacaagatgctgcccctcctgggggcagtgctgcttcagaagagagagaagaggggccctctgtggaggcactggcggtgtccaaagccgactgctatgtgcaactgtggctgcccacggcgtccccaagccctgcccagactaggatagtggccaactgcagtgaccccgagtggaatgagaccttccactaccagatccatggtgctgtgaagaacgtcctggagctcaccctctatgacaaggacatcctgggcagcgaccagctctctctgctcctgtttgacctgagaagcctcaagtgtggccaacctcacaaacacaccttcccactcaaccaccaggattcacaagagctgcaggtggaatttgttctggagaagagccaggtgcctgcatctgaagtcatcaccaacggggttctggtggctcacccctgtctgagaatccagggcacgctccggggagatgggacagccccacgggaagagtacggctctaggcagctccagctggcagtgcctggagcctacgagaagccacagctcttgcccctgcagcctcccacagagccaggcctcccacccacctttaccttccacgtgaacccagtgctgagctccaggctacacgtggagctgatggagctgctggcagctgtgcagagtggccccagcgcagagttggaggctcagaccagcaagctgggcgaggggggcatcctgctctcctctctgcccctaggccaggaggaacagtgttctgtggccctgggggagggccaggaggtggctctgagcatgaaggtggaaatgagctccggggacctagacctacgccttggctttgacctctctgacggggagcaggagtttctggacaggaggaagcaggtcgtgtccaaggccctgcagcaagtgctgggattgagtgaggctctggacagtggccaggtgcctgtagtggctgtgttgggttccgggggtggaacccgagccatgtcttctctgtacggcagcctggcagggttgcaggagctcggccttctagacactgtgacctacctgagtggggtctctgggtctacctggtgcatctccacactctacagggacccagcctggtcccaggtggccttgcagggccccattgagcgtgcccaggttcacgtctgcagcagtaagatgggagctttgtccacggagcggctacagtactacactcaggaactgggggtccgggagcgcagtggccacagcgtgtccctcatcgacctctggggcctccttgttgagtatctcctgtaccaggaggagaaccctgccaagctgtctgaccaacaggaggcggtccgccagggtcagaacccttaccccatttacaccagtgtcaacgtccgcaccaacttgagtggggaagattttgcagagtggtgcgagttcacgccctatgaggttggcttccccaagtacggggcttatgttcccaccgagctcttcggctcagaactcttcatgggacgattgctgcagctccagcctgaaccccggatctgttacctgcaaggtatgtggggcagcgcctttgccaccagcctggatgagatcttcctaaagaccgccggctcgggcctcagcttcctggagtggtacagaggcagtgtgaatatcacagacgactgccagaagcctcagctgcacaacccctcgaggctgcgaacgaggctcctcaccccacaggggcccttctcccaggctgtgctggacatattcacctcccgcttcacttccgcccagagctttaacttcacccggggtctctgcttgcacaaggactatgtggctggcagggagttcgtggcctggaaagacacacacccggacgccttccccaaccagctcacccccatgcgggactgcctgtacctggtggacggaggctttgccatcaactctccgttcccactggctctgctgcctcagagagcagtggacctcattctgtcctttgactattccttggaagccccttttgaggtcttgaagatgacagagaagtactgcctggaccgaggaatccccttccctagcatcgaggtgggccctgaggacatggaggaggcccgtgagtgctatctgtttgccaaggctgaggacccccgctcccccattgtgctgcacttccccctggttaaccgtaccttccgcacacacctggccccaggtgtggagcgacaaacagctgaggagaaggcctttggggactttgtcatcaacaggccagacaccccctatggcatgatgaacttcacctatgagccccaggacttttatcggctggtggccctcagtcgatacaacgtcctgaacaacgtggagaccttgaagtgcgccctccagctggctctggaccggcaccaggctcgggagagggcaggggcctgaccaaggcaggaagcggaggactgtgacagagaggagacacactgctcatggtcagggcttgtagagggaggagcgatggggactctgtgcaggatctgcttcccttctctccaggacctgcctcgaggtgccccaggccccggaaagctcttgcagaattgcagcttggactggggcagggctctccttgtgtgtttttggagaagatgggcagtagatcgctccagggactcttggggatgtagggcagaagagaacagcactcatttcacagcggggtgtggagagaatcaggtgagccacagagcccaccccagacacagaaggacctcagagggcccaagtcctcagacccacacagaacaggggctgagggcactgagaagccagctgtcctccttacactgagatggaaagcagagatgcatccatccacacttcctgcagagcggcccaagccccaaccccacctcgagctcctggatgcactgctatcaagaacaatgaggggctgaggggatggccagcctatgttgctgactccatcatcctaaccctccttctgccttctggtctcctcgtgcctcctcccagatcacccttctcttcccagcgccctaaagcctgtggggtgatgtcccattctggctgctccaggtgggagatgtgcgcgtgtctccctgccagttacccaggcttcactcttcgaacctggaccacagtctctggtgatgtgtgtagtggccacatcatgcaaatatagtctcaccattcctaggagct

SEQ ID NO: 7458 - protein, 600 aa, Homo sapiens
MELLAAVQSGPSAELEAQTSKLGEGGILLSSLPLGQEEQCSVALGEGQEVALSMKVEMSSGDLDLRLGFDLSDGEQEFLDRRKQVVSKALQQVLGLSEALDSGQVPVVAVLGSGGGTRAMSSLYGSLAGLQELGLLDTVTYLSGVSGSTWCISTLYRDPAWSQVALQGPIERAQVHVCSSKMGALSTERLQYYTQELGVRERSGHSVSLIDLWGLLVEYLLYQEENPAKLSDQQEAVRQGQNPYPIYTSVNVRTNLSGEDFAEWCEFTPYEVGFPKYGAYVPTELFGSELFMGRLLQLQPEPRICYLQGMWGSAFATSLDEIFLKTAGSGLSFLEWYRGSVNITDDCQKPQLHNPSRLRTRLLTPQGPFSQAVLDIFTSRFTSAQSFNFTRGLCLHKDYVAGREFVAWKDTHPDAFPNQLTPMRDCLYLVDGGFAINSPFPLALLPQRAVDLILSFDYSLEAPFEVLKMTEKYCLDRGIPFPSIEVGPEDMEEARECYLFAKAEDPRSPIVLHFPLVNRTFRTHLAPGVERQTAEEKAFGDFVINRPDTPYGMMNFTYEPQDFYRLVALSRYNVLNNVETLKCALQLALDRHQARERAGA

SEQ ID NO: 7459 - DNA, 3037 bp, Homo sapiens
agcagtttgtgcaaccagaggagcgcaggcagggttccctgctggggcccgggctgcccagccatgctttgggcactctggccaaggtggctggcagacaagatgctgcccctcctgggggcagtgctgcttcagaagagagagaagaggggccctctgtggaggcactggcggcgggaaacctacccatactatgacctccaggtgaaggtgctgagggccacaaacatccggggcacagacctgctgtccaaagccgactgctatgtgcaactgtggctgcccacggcgtccccaagccctgcccagactaggatagtggccaactgcagtgaccccgagtggaatgagaccttccactaccagatccatggtgctgtgaagaacgtcctggagctcaccctctatgacaaggacatcctgggcagcgaccagctctctctgctcctgtttgacctgagaagcctcaagtgtggccaacctcacaaacacaccttcccactcaaccaccaggattcacaagagctgcaggtggaatttgttctggagaagagccaggtgcctgcatctgaagtcatcaccaacggggttctggtggctcacccctgtctgagaatccagggcacgctccggggagatgggacagccccacgggaagagtacggctctaggcagctccagctggcagtgcctggagcctacgagaagccacagctcttgcccctgcagcctcccacagagccaggcctcccacccacctttaccttccacgtgaacccagtgctgagctccaggctacacgtggagctgatggagctgctggcagctgtgcagagtggccccagcgcagagttggaggctcagaccagcaagctgggcgaggggggcatcctgctctcctctctgcccctaggccaggaggaacagtgttctgtggccctgggggagggccaggaggtggctctgagcatgaaggtggaaatgagctccggggacctagacctacgccttggctttgacctctctgacggggagcaggagtttctggacaggaggaagcaggtcgtgtccaaggccctgcagcaagtgctgggattgagtgaggctctggacagtggccaggtgcctgtagtggctgtgttgggttccgggggtggaacccgagccatgtcttctctgtacggcagcctggcagggttgcaggagctcggccttctagacactgtgacctacctgagtggggtctctgggtctacctggtgcatctccacactctacagggacccagcctggtcccaggtggccttgcagggccccattgagcgtgcccaggttcacgtctgcagcagtaagatgggagctttgtccacggagcggctacagtactacactcaggaactgggggtccgggagcgcagtggccacagcgtgtccctcatcgacctctggggcctccttgttgagtatctcctgtaccaggaggagaaccctgccaagctgtctgaccaacaggaggcggtccgccagggtcagaacccttaccccatttacaccagtgtcaacgtccgcaccaacttgagtggggaagattttgcagagtggtgcgagttcacgccctatgaggttggcttccccaagtacggggcttatgttcccaccgagctcttcggctcagaactcttcatgggacgattgctgcagctccagcctgaaccccggatctgttacctgcaaggtatgtggggcagcgcctttgccaccagcctggatgagatcttcctaaagaccgccggctcgggcctcagcttcctggagtggtacagaggcagtgtgaatatcacagacgactgccagaagcctcagctgcacaacccctcgaggctgcgaacgaggctcctcaccccacaggggcccttctcccaggctgtgctggacatattcacctcccgcttcacttccgcccagagctttaacttcacccggggtctctgcttgcacaaggactatgtggctggcagggagttcgtggcctggaaagacacacacccggacgccttccccaaccagctcacccccatgcgggactgcctgtacctggtggacggaggctttgccatcaactctccgttcccactggctctgctgcctcagagagcagtggacctcattctgtcctttgactattccttggaagccccttttgaggtcttgaagatgacagagaagtactgcctggaccgaggaatccccttccctagcatcgaggtgggccctgaggacatggaggaggcccgtgagtgctatctgtttgccaaggctgaggacccccgctcccccattgtgctgcacttccccctggttaaccgtaccttccgcacacacctggccccaggtgtggagcgacaaacagctgaggagaaggcctttggggactttgtcatcaacaggccagacaccccctatggcatgatgaacttcacctatgagccccaggacttttatcggctggtggccctcagtcgatacaacgtcctgaacaacgtggagaccttgaagtgcagcccaccccagacacagaaggacctcagagggcccaagtcctcagacccacacagaacaggggctgagggcactgagaagccagctgtcctccttacactgagatggaaagcagagatgcatccatccacacttcctgcagagcggcccaagccccaaccccacctcgagctcctggatgcactgctatcaagaacaatgaggggctgaggggatggccagcctatgttgctgactccatcatcctaaccctccttctgccttctggtctcctcgtgcctcctcccagatcacccttctcttcccagcgccctaaagcctgtggggtgatgtcccattctggctgctccaggtgggagatgtgcgcgtgtctccctgccagttacccaggcttcactcttcgaacctggaccacagtctctggtgatgtgtgtagtggccacatcatgcaaatatagtctcaccattcctaggagct

SEQ ID NO: 7460 - protein, 901 aa, Homo sapiens; identical to SEQ ID NO: 7454

SEQ ID NO: 7461 - DNA, 3463 bp, Homo sapiens
atgactttattgtgcagtggggccgatgacttccagaagaggatgtgctgcctgtcacacctgagccagcagtttgtgcaaccagaggagcgcaggcagggttccctgctggggcccgggctgcccagccatgctttgggcactctggccaaggtggctggcagacaagatgctgcccctcctgggggcagtgctgcttcagaagagagagaagaggggccctctgtggaggcactggcggcgggaaacctacccatactatgacctccaggtgaaggtgctgagggccacaaacatccggggcacagacctgctgtccaaagccgactgctatgtgcaactgtggctgcccacggcgtccccaagccctgcccagactaggatagtggccaactgcagtgaccccgagtggaatgagaccttccactaccagatccatggtgctgtgaagaacgtcctggagctcaccctctatgacaaggacatcctgggcagcgaccagctctctctgctcctgtttgacctgagaagcctcaagtgtggccaacctcacaaacacaccttcccactcaaccaccaggattcacaagagctgcaggtggaatttgttctggagaagagccaggtgcctgcatctgaagtcatcaccaacggggttctggtggctcacccctgtctgagaatccagggcacgctccggggagatgggacagccccacgggaagagtacggctctaggcagctccagctggcagtgcctggagcctacgagaagccacagctcttgcccctgcagcctcccacagagccaggcctcccacccacctttaccttccacgtgaacccagtgctgagctccaggctacacgtggagctgatggagctgctggcagctgtgcagagtggccccagcgcagagttggaggctcagaccagcaagctgggcgaggggggcatcctgctctcctctctgcccctaggccaggaggaacagtgttctgtggccctgggggagggccaggaggtggctctgagcatgaaggtggaaatgagctccggggacctagacctacgccttggctttgacctctctgacggggagcaggagtttctggacaggaggaagcaggtcgtgtccaaggccctgcagcaagtgctgggattgagtgaggctctggacagtggccaggtgcctgtagtggctgtgttgggttccgggggtggaacccgagccatgtcttctctgtacggcagcctggcagggttgcaggagctcggccttctagacactgtgacctacctgagtggggtctctgggtctacctggtgcatctccacactctacagggacccagcctggtcccaggtggccttgcagggccccattgagcgtgcccaggttcacgtctgcagcagtaagatgggagctttgtccacggagcggctacagtactacactcaggaactgggggtccgggagcgcagtggccacagcgtgtccctcatcgacctctggggcctccttgttgagtatctcctgtaccaggaggagaaccctgccaagctgtctgaccaacaggaggcggtccgccagggtcagaacccttaccccatttacaccagtgtcaacgtccgcaccaacttgagtggggaagattttgcagagtggtgcgagttcacgccctatgaggttggcttccccaagtacggggcttatgttcccaccgagctcttcggctcagaactcttcatgggacgattgctgcagctccagcctgaaccccggatctgttacctgcaaggtatgtggggcagcgcctttgccaccagcctggatgagatcttcctaaagaccgccggctcgggcctcagcttcctggagtggtacagaggcagtgtgaatatcacagacgactgccagaagcctcagctgcacaacccctcgaggctgcgaacgaggctcctcaccccacaggggcccttctcccaggctgtgctggacatattcacctcccgcttcacttccgcccagagctttaacttcacccggggtctctgcttgcacaaggactatgtggctggcagggagttcgtggcctggaaagacacacacccggacgccttccccaaccagctcacccccatgcgggactgcctgtacctggtggacggaggctttgccatcaactctccgttcccactggctctgctgcctcagagagcagtggacctcattctgtcctttgactattccttggaagccccttttgaggtcttgaagatgacagagaagtactgcctggaccgaggaatccccttccctagcatcgaggtgggccctgaggacatggaggaggcccgtgagtgctatctgtttgccaaggctgaggacccccgctcccccattgtgctgcacttccccctggttaaccgtaccttccgcacacacctggccccaggtgtggagcgacaaacagctgaggagaaggcctttggggactttgtcatcaacaggccagacaccccctatggcatgatgaacttcacctatgagccccaggacttttatcggctggtggccctcagtcgatacaacgtcctgaacaacgtggagaccttgaagtgcgccctccagctggctctggaccggcaccaggctcgggagagggcaggggcctgaccaaggcaggaagcggaggactgtgacagagaggagacacactgctcatggtcagggcttgtagagggaggagcgatggggactctgtgcaggatctgcttcccttctctccaggacctgcctcgaggtgccccaggccccggaaagctcttgcagaattgcagcttggactggggcagggctctccttgtgtgtttttggagaagatgggcagtagatcgctccagggactcttggggatgtagggcagaagagaacagcactcatttcacagcggggtgtggagagaatcaggtgagccacagagcccaccccagacacagaaggacctcagagggcccaagtcctcagacccacacagaacaggggctgagggcactgagaagccagctgtcctccttacactgagatggaaagcagagatgcatccatccacacttcctgcagagcggcccaagccccaaccccacctcgagctcctggatgcactgctatcaagaacaatgaggggctgaggggatggccagcctatgttgctgactccatcatcctaaccctccttctgccttctggtctcctcgtgcctcctcccagatcacccttctcttcccagcgccctaaagcctgtggggtgatgtcccattctggctgctccaggtgggagatgtgcgcgtgtctccctgccagttacccaggcttcactcttcgaacctggaccacagtctctggtgatgtgtgtagtggccacatcatgcaaatatagtctcaccattcctaggagct

SEQ ID NO: 7462 - protein, 849 aa, Homo sapiens; identical to SEQ ID NO: 7456

SEQ ID NO: 7463 - DNA, 1295 bp, Homo sapiens
gaccgctcagcatggctcactggagagttccatgagagaacagcactcaagcttctggccgcatggacccgatggctcgcattctgtgtagtgttttacgtctccatggtaactgtgccctgcacccctcggtagccgccctgttagttttcagtctccttttctttctcaccatttatcacttccctcactgccctacccaggctttctctcccacttccctgactctgggaataactaatatttaagcaaggtaagatgagaagcaaggggtctcagttctaggaatacagtgctagttgattgtcaggtatgttgtaaatagaccctctttggccatacactccatgcctagatgcctcggagagcatcattctctgcctaggcaaggccctgcatcccttgcctcaggccgggctgagtgtgactgcagctcctgaggatgggcctgccctgtctggggtatgcgtgatccctagatacatgttcccacagaggtgcctgctccgtcttcgctcaccagacactcaggcaggctggcttagtctttgtgcgtggcgattttgtgctctgggccctttctctttttccagccagtttccattcacttgccttacagcctgccctggccgtcactccccagctttgttcagcaatggtgtggttggagagttgtgctgggatagcgcaggaaggtgggtcccggcaacacgcaggggatgagtggacctggaactgacaatggcgtgctgccaagtgttcctgagaggtgtttaggcacagcagaggggacgcggggggcaagaacagcaggacgctggtttaaaaataactcaccgccaaacctgtggagcagtgtggggcatcctgccagaggtgcacaggctggagtttcaggcactgcaggctgatgacacacagggagatgctgcccggggcctcatctgggccagcttggactctgcttcctccaggagcagcagggaagctctgggccacctccctggatagcaggaacttgacctgccatgtgtgccctgccttcctggccagctgtgcttgttatcttccattctcacaaactgtctttgaagcaatagaataaagaatgtgtgttttctttcctggtatacatacatgatcccatgctcccaagctccattcttccttccctcaactctctgccctccacagagctatggagaaggctggagatgaaagctttgtagtgaggactgataaagatctcatcactgctccttataataaacctaataaagcaagaaaccaagcct

SEQ ID NO: 7464 - protein, 64 aa, Homo sapiens
MTHREMLPGASSGPAWTLLPPGAAGKLWATSLDSRNLTCHVCPAFLASCACYLPFSQTVFEAIE

SEQ ID NO: 7465 - DNA, 4713 bp, Homo sapiens
atgcacgacgctttcgagccagtgccgatcctagaaaagctgcctctgcaaatcgactgtctggctgcctgggaggaatggcttcttgtgggaaccaaacaaggacatcttcttctctataggattcggaaggacgttgtgccagcagatgtagcatcacctgaaagcggcagttgcaacagatttgaagtgacactagagaaatccaataagaacttctccaaaaagattcagcagatccatgtggtttcccagtttaagattctggtcagcttgttagaaaataacatttatgtccatgacctattgacatttcaacaaatcactacggtttcaaaggcaaagggagcatcactgtttacttgtgacctccagcacacagagaccggtgaggaggtgttacggatgtgtgtggcagtaaaaaagaagctgcagctctatttctggaaggacagggaatttcatgaattgcagggggactttagtgtgccagatgtgcccaagtccatggcgtggtgtgaaaattctatctgtgtgggtttcaagagagactactacctaataagggtggatggaaaggggtccatcaaagagctctttccaacaggaaaacagctggagcccttagttgcacctctggcagatggaaaagtggctgtgggccaggatgatctcaccgtggtactcaatgaggaagggatctgcacacagaaatgtgccctgaactggacggacataccagtggccatggagcaccagcctccctacatcattgcagtgttgcctcgatatgttgagatccgaacatttgaaccgaggcttctggtccaaagcattgaattgcaaaggccccgtttcattacctcaggaggatcaaacattatctatgtggccagcaatcattttgtttggagactcatccctgtccccatggcaacccaaatccaacaacttctccaggacaagcagtttgaattggctctgcagctcgcagaaatgaaagatgattctgacagtgaaaagcagcaacaaattcatcacatcaagaacttgtatgccttcaacctcttctgccagaagcgttttgatgagtccatgcaggtctttgctaaacttggcacagatcccacccatgtgatgggcctgtaccctgacctgctgcccacagactacagaaagcagttgcagtatcccaacccattgcctgtgctctccggggctgaattggagaaggctcacttagctctgattgactacctgacacagaaacgaagtcaattggtaaagaagctgaatgactctgatcaccagtcaagcacctcaccgctcatggaaggcactcccaccatcaaatccaagaagaagctgctacaaatcatcgacaccaccctgctcaagtgctatctccatacaaatgtggccctggtggcccccttgctacgcctggagaacaatcactgccacatcgaggagagcgagcacgtgctaaagaaggctcacaagtacagtgagcttatcatcctgtatgagaagaaggggctccacgagaaagctctgcaggtgctcgtggaccagtccaagaaagccaactcccctctgaaaggccacgagaggacagtgcagtatctgcagcatctgggcacagaaaacctgcatttgattttctcctactcagtgtgggtgctgagagacttcccagaagatggcctgaagatatttactgaagatctcccggaagtggagtctctgccacgtgatcgagtcctcggcttcttaatagagaattttaagggtctggctattccttatctggaacacatcatccatgtttgggaggagacaggctctcggttccacaactgcctgatccagctatactgtgagaaggtgcaaggtctgatgaaggagtatctcctgtccttccctgcaggcaaaaccccagtcccagctggagaggaagagggtgagctgggagaataccggcaaaagctcctcatgttcttggagatttccagctactatgatccaggccggctcatctgtgattttccctttgatggcctcttagaagaacgagctctcctgttggggcgcatggggaaacatgaacaagctcttttcatttatgtccacatcttgaaggatacaaggatggctgaggagtactgccacaaacactatgaccgaaacaaagatggcaacaaagatgtgtatctgtccctgcttcggatgtacctgtcgccccccagcattcactgcctggggccaatcaagctggaactactggagccaaaagccaacctccaggccgctctgcaggtcctcgagctacaccacagcaaactggacaccaccaaggccctcaaccttctgccagcaaacactcagatcaatgacatacgcatcttcctggaaaaggtcttggaagaaaatgcacaaaagaaacggttcaatcaagtgctcaagaaccttctccatgcagaattcctgagggtccaggaagagcggattttacaccagcaggtgaagtgcatcatcacagaggagaaggtgtgcatggtgtgtaagaagaagattgggaacagtgcatttgcaagataccccaatggagtggtcgtccattacttctgttccaaagaggtaaacccagctgacacttgagcccagcatcctggggatccagcggatggacagcttggctctcccagagaggtgaaggagcacctggccttaggaatcctggctgccaccaccacaaggctccccatttggacattactggctatcttgtgccctggaacaactctgaattaattagactcatggtctggcattgccagctttttaatgggaaaagagattagttataccttataccattatgttgtgggcaattccagagaattcagtacctgcttggtcaggaggatgtgcaccatcttgcctttgcacaccagtcacctgaacaaggaaacttgtcacaagtgtttgtaaccatggggttgttcatcaagggcttttctattaagtacatgacttcacaaggaccgctcagcatggctcactggagagttccatgagagaacagcactcaagcttctggccgcatggacccgatggctcgcattctgtgtagtgttttacgtctccatggtaactgtgccctgcacccctcggtagccgccctgttagttttcagtctccttttctttctcaccatttatcacttccctcactgccctacccaggctttctctcccacttccctgactctgggaataactaatatttaagcaaggtaagatgagaagcaaggggtctcagttctaggaatacagtgctagttgattgtcaggtatgttgtaaatagaccctctttggccatacactccatgcctagatgcctcggagagcatcattctctgcctaggcaaggccctgcatcccttgcctcaggccgggctgagtgtgactgcagctcctgaggatgggcctgccctgtctggggtatgcgtgatccctagatacatgttcccacagaggtgcctgctccgtcttcgctcaccagacactcaggcaggctggcttagtctttgtgcgtggcgattttgtgctctgggccctttctctttttccagccagtttccattcacttgccttacagcctgccctggccgtcactccccagctttgttcagcaatggtgtggttggagagttgtgctgggatagcgcaggaaggtgggtcccggcaacacgcaggggatgagtggacctggaactgacaatggcgtgctgccaagtgttcctgagaggtgtttaggcacagcagaggggacgcggggggcaagaacagcaggacgctggtttaaaaataactcaccgccaaacctgtggagcagtgtggggcatcctgccagaggtgcacaggctggagtttcaggcactgcaggctgatgacacacagggagagtggccctgcctcctgtcctccccggggtttttgcagactcgaagtctcactgcaccagtgtctttgatggtggtgagggtgggtgatggtgcccagcaccaacagttttagtggcctgtccttgacctgccgtggtcctttgtaaactatggctccatgctgtgtgacagatcaacgtgctgatggtaagtagactaggcttccccaggcatgccgtccgtgggggcctgaagagacagtgagtgccattggccccattcgcagatgtgggagactctgctcaggcctgtgaggctgggcagcccttcaccagagttcggaggagcagtgtgtggcgccacgtcccgactggccatacccacacagaagcagtgctgcccggggcctcatctgggccagcttggactctgcttcctccaggagcagcagggaagctctgggccacctccctggatagcaggaacttgacctgccatgtgtgccctgccttcctggccagctgtgcttgttatcttccattctcacaaactgtctttgaagcaatagaataaagaatgtgtgttttctttcctggtatacatacatgatcccatgctcccaagctccattcttccttccctcaactctctgccctccacagagctatggagaaggctggagatgaaagctttgtagtgaggactgataaagatctcatcactgctccttataataaacctaataaagcaagaaaccaagcct

SEQ ID NO: 7466 - protein, 886 aa, Homo sapiens
MHDAFEPVPILEKLPLQIDCLAAWEEWLLVGTKQGHLLLYRIRKDVVPADVASPESGSCNRFEVTLEKSNKNFSKKIQQIHVVSQFKILVSLLENNIYVHDLLTFQQITTVSKAKGASLFTCDLQHTETGEEVLRMCVAVKKKLQLYFWKDREFHELQGDFSVPDVPKSMAWCENSICVGFKRDYYLIRVDGKGSIKELFPTGKQLEPLVAPLADGKVAVGQDDLTVVLNEEGICTQKCALNWTDIPVAMEHQPPYIIAVLPRYVEIRTFEPRLLVQSIELQRPRFITSGGSNIIYVASNHFVWRLIPVPMATQIQQLLQDKQFELALQLAEMKDDSDSEKQQQIHHIKNLYAFNLFCQKRFDESMQVFAKLGTDPTHVMGLYPDLLPTDYRKQLQYPNPLPVLSGAELEKAHLALIDYLTQKRSQLVKKLNDSDHQSSTSPLMEGTPTIKSKKKLLQIIDTTLLKCYLHTNVALVAPLLRLENNHCHIEESEHVLKKAHKYSELIILYEKKGLHEKALQVLVDQSKKANSPLKGHERTVQYLQHLGTENLHLIFSYSVWVLRDFPEDGLKIFTEDLPEVESLPRDRVLGFLIENFKGLAIPYLEHIIHVWEETGSRFHNCLIQLYCEKVQGLMKEYLLSFPAGKTPVPAGEEEGELGEYRQKLLMFLEISSYYDPGRLICDFPFDGLLEERALLLGRMGKHEQALFIYVHILKDTRMAEEYCHKHYDRNKDGNKDVYLSLLRMYLSPPSIHCLGPIKLELLEPKANLQAALQVLELHHSKLDTTKALNLLPANTQINDIRIFLEKVLEENAQKKRFNQVLKNLLHAEFLRVQEERILHQQVKCIITEEKVCMVCKKKIGNSAFARYPNGVVVHYFCSKEVNPADT

SEQ ID NO: 7467 - DNA, 4836 bp, Homo sapiens
agtccggggttgacgatggctgtgttgttgaagggcctgtagccggggggttcctggccggatcccggtctacccttagcccagactcgttccggaccccagcccggcccggaacactctgggcgagacggcggtggcaactctccccttgccgccatgcacgacgctttcgagccagtgccgatcctagaaaagctgcctctgcaaatcgactgtctggctgcctgggaggaatggcttcttgtgggaaccaaacaaggacatcttcttctctataggattcggaaggacgttggttgcaacagatttgaagtgacactagagaaatccaataagaacttctccaaaaagattcagcagatccatgtggtttcccagtttaagattctggtcagcttgttagaaaataacatttatgtccatgacctattgacatttcaacaaatcactacggtttcaaaggcaaagggagcatcactgtttacttgtgacctccagcacacagagaccggtgaggaggtgttacggatgtgtgtggcagtaaaaaagaagctgcagctctatttctggaaggacagggaatttcatgaattgcagggggactttagtgtgccagatgtgcccaagtccatggcgtggtgtgaaaattctatctgtgtgggtttcaagagagactactacctaataagggtggatggaaaggggtccatcaaagagctctttccaacaggaaaacagctggagcccttagttgcacctctggcagatggaaaagtggctgtgggccaggatgatctcaccgtggtactcaatgaggaagggatctgcacacagaaatgtgccctgaactggacggacataccagtggccatggagcaccagcctccctacatcattgcagtgttgcctcgatatgttgagatccgaacatttgaaccgaggcttctggtccaaagcattgaattgcaaaggccccgtttcattacctcaggaggatcaaacattatctatgtggccagcaatcattttgtttggagactcatccctgtccccatggcaacccaaatccaacaacttctccaggacaagcagtttgaattggctctgcagctcgcagaaatgaaagatgattctgacagtgaaaagcagcaacaaattcatcacatcaagaacttgtatgccttcaacctcttctgccagaagcgttttgatgagtccatgcaggtctttgctaaacttggcacagatcccacccatgtgatgggcctgtaccctgacctgctgcccacagactacagaaagcagttgcagtatcccaacccattgcctgtgctctccggggctgaattggagaaggctcacttagctctgattgactacctgacacagaaacgaagtcaattggtaaagaagctgaatgactctgatcaccagtcaagcacctcaccgctcatggaaggcactcccaccatcaaatccaagaagaagctgctacaaatcatcgacaccaccctgctcaagtgctatctccatacaaatgtggccctggtggcccccttgctacgcctggagaacaatcactgccacatcgaggagagcgagcacgtgctaaagaaggctcacaagtacagtgagcttatcatcctgtatgagaagaaggggctccacgagaaagctctgcaggtgctcgtggaccagtccaagaaagccaactcccctctgaaaggccacgagaggacagtgcagtatctgcagcatctgggcacagaaaacctgcatttgattttctcctactcagtgtgggtgctgagagacttcccagaagatggcctgaagatatttactgaagatctcccggaagtggagtctctgccacgtgatcgagtcctcggcttcttaatagagaattttaagggtctggctattccttatctggaacacatcatccatgtttgggaggagacaggctctcggttccacaactgcctgatccagctatactgtgagaaggtgcaaggtctgatgaaggagtatctcctgtccttccctgcaggcaaaaccccagtcccagctggagaggaagagggtgagctgggagaataccggcaaaagctcctcatgttcttggagatttccagctactatgatccaggccggctcatctgtgattttccctttgatggcctcttagaagaacgagctctcctgttggggcgcatggggaaacatgaacaagctcttttcatttatgtccacatcttgaaggatacaaggatggctgaggagtactgccacaaacactatgaccgaaacaaagatggcaacaaagatgtgtatctgtccctgcttcggatgtacctgtcgccccccagcattcactgcctggggccaatcaagctggaactactggagccaaaagccaacctccaggccgctctgcaggtcctcgagctacaccacagcaaactggacaccaccaaggccctcaaccttctgccagcaaacactcagatcaatgacatacgcatcttcctggaaaaggtcttggaagaaaatgcacaaaagaaacggttcaatcaagtgctcaagaaccttctccatgcagaattcctgagggtccaggaagagcggattttacaccagcaggtgaagtgcatcatcacagaggagaaggtgtgcatggtgtgtaagaagaagattgggaacagtgcatttgcaagataccccaatggagtggtcgtccattacttctgttccaaagaggtaaacccagctgacacttgagcccagcatcctggggatccagcggatggacagcttggctctcccagagaggtgaaggagcacctggccttaggaatcctggctgccaccaccacaaggctccccatttggacattactggctatcttgtgccctggaacaactctgaattaattagactcatggtctggcattgccagctttttaatgggaaaagagattagttataccttataccattatgttgtgggcaattccagagaattcagtacctgcttggtcaggaggatgtgcaccatcttgcctttgcacaccagtcacctgaacaaggaaacttgtcacaagtgtttgtaaccatggggttgttcatcaagggcttttctattaagtacatgacttcacaaggaccgctcagcatggctcactggagagttccatgagagaacagcactcaagcttctggccgcatggacccgatggctcgcattctgtgtagtgttttacgtctccatggtaactgtgccctgcacccctcggtagccgccctgttagttttcagtctccttttctttctcaccatttatcacttccctcactgccctacccaggctttctctcccacttccctgactctgggaataactaatatttaagcaaggtaagatgagaagcaaggggtctcagttctaggaatacagtgctagttgattgtcaggtatgttgtaaatagaccctctttggccatacactccatgcctagatgcctcggagagcatcattctctgcctaggcaaggccctgcatcccttgcctcaggccgggctgagtgtgactgcagctcctgaggatgggcctgccctgtctggggtatgcgtgatccctagatacatgttcccacagaggtgcctgctccgtcttcgctcaccagacactcaggcaggctggcttagtctttgtgcgtggcgattttgtgctctgggccctttctctttttccagccagtttccattcacttgccttacagcctgccctggccgtcactccccagctttgttcagcaatggtgtggttggagagttgtgctgggatagcgcaggaaggtgggtcccggcaacacgcaggggatgagtggacctggaactgacaatggcgtgctgccaagtgttcctgagaggtgtttaggcacagcagaggggacgcggggggcaagaacagcaggacgctggtttaaaaataactcaccgccaaacctgtggagcagtgtggggcatcctgccagaggtgcacaggctggagtttcaggcactgcaggctgatgacacacagggagagtggccctgcctcctgtcctccccggggtttttgcagactcgaagtctcactgcaccagtgtctttgatggtggtgagggtgggtgatggtgcccagcaccaacagttttagtggcctgtccttgacctgccgtggtcctttgtaaactatggctccatgctgtgtgacagatcaacgtgctgatggtaagtagactaggcttccccaggcatgccgtccgtgggggcctgaagagacagtgagtgccattggccccattcgcagatgtgggagactctgctcaggcctgtgaggctgggcagcccttcaccagagttcggaggagcagtgtgtggcgccacgtcccgactggccatacccacacagaagcagtgctgcccggggcctcatctgggccagcttggactctgcttcctccaggagcagcagggaagctctgggccacctccctggatagcaggaacttgacctgccatgtgtgccctgccttcctggccagctgtgcttgttatcttccattctcacaaactgtctttgaagcaatagaataaagaatgtgtgttttctttcctggtatacatacatgatcccatgctcccaagctccattcttccttccctcaactctctgccctccacagagctatggagaaggctggagatgaaagctttgtagtgaggactgataaagatctcatcactgctccttataataaacctaataaagcaagaaaccaagcct

SEQ ID NO: 7468 - protein, 875 aa, Homo sapiens; identical to SEQ ID NO: 1026

SEQ ID NO: 7469 - DNA, 548 bp, Homo sapiens
aacaactctgaattaattagactcatggtctggcattgccagctttttaatgggaaaagagattagttataccttataccattatgttgtgggcaattccagagaattcagtacctgcttggtcaggaggatgtgcaccatcttgcctttgcacaccagtcacctgaacaaggaaacttgtcacaagtgtttgtaaccatggggttgttcatcaagggcttttctattaagtacatgacttcacaaggaccgctcagcatggctcactggagagttccatgagagaacagcactcaagcttctggccgcatggacccgatggctcgcattctgtgtagtgttttacgtctccatggtaactgtgccctgcacccctcggtagccgccctgttagttttcagtctccttttctttctcaccatttatcacttccctcatctctgccctccacagagctatggagaaggctggagatgaaagctttgtagtgaggactgataaagatctcatcactgctccttataataaacctaataaagcaagaaacc

SEQ ID NO: 7470 - protein, 55 aa, Homo sapiens
MDPMARILCSVLRLHGNCALHPSVAALLVFSLLFFLTIYHFPHLCPPQSYGEGWR

SEQ ID NO: 7471 - DNA, 4558 bp, Homo sapiens
atgcacgacgctttcgagccagtgccgatcctagaaaagctgcctctgcaaatcgactgtctggctgcctgggaggaatggcttcttgtgggaaccaaacaaggacatcttcttctctataggattcggaaggacgttgtgccagcagatgtagcatcacctgaaagcggcagttgcaacagatttgaagtgacactagagaaatccaataagaacttctccaaaaagattcagcagatccatgtggtttcccagtttaagattctggtcagcttgttagaaaataacatttatgtccatgacctattgacatttcaacaaatcactacggtttcaaaggcaaagggagcatcactgtttacttgtgacctccagcacacagagaccggtgaggaggtgttacggatgtgtgtggcagtaaaaaagaagctgcagctctatttctggaaggacagggaatttcatgaattgcagggggactttagtgtgccagatgtgcccaagtccatggcgtggtgtgaaaattctatctgtgtgggtttcaagagagactactacctaataagggtggatggaaaggggtccatcaaagagctctttccaacaggaaaacagctggagcccttagttgcacctctggcagatggaaaagtggctgtgggccaggatgatctcaccgtggtactcaatgaggaagggatctgcacacagaaatgtgccctgaactggacggacataccagtggccatggagcaccagcctccctacatcattgcagtgttgcctcgatatgttgagatccgaacatttgaaccgaggcttctggtccaaagcattgaattgcaaaggccccgtttcattacctcaggaggatcaaacattatctatgtggccagcaatcattttgtttggagactcatccctgtccccatggcaacccaaatccaacaacttctccaggacaagcagtttgaattggctctgcagctcgcagaaatgaaagatgattctgacagtgaaaagcagcaacaaattcatcacatcaagaacttgtatgccttcaacctcttctgccagaagcgttttgatgagtccatgcaggtctttgctaaacttggcacagatcccacccatgtgatgggcctgtaccctgacctgctgcccacagactacagaaagcagttgcagtatcccaacccattgcctgtgctctccggggctgaattggagaaggctcacttagctctgattgactacctgacacagaaacgaagtcaattggtaaagaagctgaatgactctgatcaccagtcaagcacctcaccgctcatggaaggcactcccaccatcaaatccaagaagaagctgctacaaatcatcgacaccaccctgctcaagtgctatctccatacaaatgtggccctggtggcccccttgctacgcctggagaacaatcactgccacatcgaggagagcgagcacgtgctaaagaaggctcacaagtacagtgagcttatcatcctgtatgagaagaaggggctccacgagaaagctctgcaggtgctcgtggaccagtccaagaaagccaactcccctctgaaaggccacgagaggacagtgcagtatctgcagcatctgggcacagaaaacctgcatttgattttctcctactcagtgtgggtgctgagagacttcccagaagatggcctgaagatatttactgaagatctcccggaagtggagtctctgccacgtgatcgagtcctcggcttcttaatagagaattttaagggtctggctattccttatctggaacacatcatccatgtttgggaggagacaggctctcggttccacaactgcctgatccagctatactgtgagaaggtgcaaggtctgatgaaggagtatctcctgtccttccctgcaggcaaaaccccagtcccagctggagaggaagagggtgagctgggagaataccggcaaaagctcctcatgttcttggagatttccagctactatgatccaggccggctcatctgtgattttccctttgatggcctcttagaagaacgagctctcctgttggggcgcatggggaaacatgaacaagctcttttcatttatgtccacatcttgaaggatacaaggatggctgaggagtactgccacaaacactatgaccgaaacaaagatggcaacaaagatgtgtatctgtccctgcttcggatgtacctgtcgccccccagcattcactgcctggggccaatcaagctggaactactggagccaaaagccaacctccaggccgctctgcaggtcctcgagctacaccacagcaaactggacaccaccaaggccctcaaccttctgccagcaaacactcagatcaatgacatacgcatcttcctggaaaaggtcttggaagaaaatgcacaaaagaaacggttcaatcaagtgctcaagaaccttctccatgcagaattcctgagggtccaggaagagcggattttacaccagcaggtgaagtgcatcatcacagaggagaaggtgtgcatggtgtgtaagaagaagattgggaacagtgcatttgcaagataccccaatggagtggtcgtccattacttctgttccaaagaggtaaacccagctgacacttgagcccagcatcctggggatccagcggatggacagcttggctctcccagagaggtgaaggagcacctggccttaggaatcctggctgccaccaccacaaggctccccatttggacattactggctatcttgtgccctggaacaactctgaattaattagactcatggtctggcattgccagctttttaatgggaaaagagattagttataccttataccattatgttgtgggcaattccagagaattcagtacctgcttggtcaggaggatgtgcaccatcttgcctttgcacaccagtcacctgaacaaggaaacttgtcacaagtgtttgtaaccatggggttgttcatcaagggcttttctattaagtacatgacttcacaaggaccgctcagcatggctcactggagagttccatgagagaacagcactcaagcttctggccgcatggacccgatggctcgcattctgtgtagtgttttacgtctccatggtaactgtgccctgcacccctcggtagccgccctgttagttttcagtctccttttctttctcaccatttatcacttccctcactgccctacccaggctttctctcccacttccctgactctgggaataactaatatttaagcaaggtaagatgagaagcaaggggtctcagttctaggaatacagtgctagttgattgtcaggtatgttgtaaatagaccctctttggccatacactccatgcctagatgcctcggagagcatcattctctgcctaggcaaggccctgcatcccttgcctcaggccgggctgagtgtgactgcagctcctgaggatgggcctgccctgtctggggtatgcgtgatccctagatacatgttcccacagaggtgcctgctccgtcttcgctcaccagacactcaggcaggctggcttagtctttgtgcgtggcgattttgtgctctgggccctttctctttttccagccagtttccattcacttgccttacagcctgccctggccgtcactccccagctttgttcagcaatggtgtggttggagagttgtgctgggatagcgcaggaaggtgggtcccggcaacacgcaggggatgagtggacctggaactgacaatggcgtgctgccaagtgttcctgagaggtgtttaggcacagcagaggggacgcggggggcaagaacagcaggacgctggtttaaaaataactcaccgccaaacctgtggagcagtgtggggcatcctgccagaggtgcacaggctggagtttcaggcactgcaggctgatgacacacagggagagtggccctgcctcctgtcctccccggggtttttgcagactcgaagtctcactgcaccagtgtctttgatggtggtgagggtgggtgatggtgcccagcaccaacagttttagtggcctgtccttgacctgccgtggtcctttgtaaactatggctccatgctgtgtgacagatcaacgtgctgatggtaagtagactaggcttccccaggcatgccgtccgtgggggcctgaagagacagtgagtgccattggccccattcgcagatgtgggagactctgctcaggcctgtgaggctgggcagcccttcaccagagttcggaggagcagtgtgtggcgccacgtcccgactggccatacccacacagaagcagtgctgcccggggcctcatctgggccagcttggactctgcttcctccaggagcagcagggaagctctgggccacctccctggatagcaggaacttgacctgccatgtgtgccctgccttcctggccagctgtgcttgttatcttccattctcacaaactgtctttgaagcaatagaataaagaatgtgtgttttctttcctggtatacatacatg

SEQ ID NO: 7472 - protein, 886 aa, Homo sapiens; identical to SEQ ID NO: 7466

SEQ ID NO: 7473 - DNA, 3239 bp, Homo sapiens
agtccggggttgacgatggctgtgttgttgaagggcctgtagccggggggttcctggccggatcccggtctacccttagcccagactcgttccggaccccagcccggcccggaacactctgggcgagacggcggtggcaactctccccttgccgccatgcacgacgctttcgagccagtgccgatcctagaaaagctgcctctgcaaatcgactgtctggctgcctgggaggaatggcttcttgtgggaaccaaacaaggacatcttcttctctataggattcggaaggacgttggttgcaacagatttgaagtgacactagagaaatccaataagaacttctccaaaaagattcagcagatccatgtggtttcccagtttaagattctggtcagcttgttagaaaataacatttatgtccatgacctattgacatttcaacaaatcactacggtttcaaaggcaaagggagcatcactgtttacttgtgacctccagcacacagagaccggtgaggaggtgttacggatgtgtgtggcagtaaaaaagaagctgcagctctatttctggaaggacagggaatttcatgaattgcagggggactttagtgtgccagatgtgcccaagtccatggcgtggtgtgaaaattctatctgtgtgggtttcaagagagactactacctaataagggtggatggaaaggggtccatcaaagagctctttccaacaggaaaacagctggagcccttagttgcacctctggcagatggaaaagtggctgtgggccaggatgatctcaccgtggtactcaatgaggaagggatctgcacacagaaatgtgccctgaactggacggacataccagtggccatggagcaccagcctccctacatcattgcagtgttgcctcgatatgttgagatccgaacatttgaaccgaggcttctggtccaaagcattgaattgcaaaggccccgtttcattacctcaggaggatcaaacattatctatgtggccagcaatcattttgtttggagactcatccctgtccccatggcaacccaaatccaacaacttctccaggacaagcagtttgaattggctctgcagctcgcagaaatgaaagatgattctgacagtgaaaagcagcaacaaattcatcacatcaagaacttgtatgccttcaacctcttctgccagaagcgttttgatgagtccatgcaggtctttgctaaacttggcacagatcccacccatgtgatgggcctgtaccctgacctgctgcccacagactacagaaagcagttgcagtatcccaacccattgcctgtgctctccggggctgaattggagaaggctcacttagctctgattgactacctgacacagaaacgaagtcaattggtaaagaagctgaatgactctgatcaccagtcaagcacctcaccgctcatggaaggcactcccaccatcaaatccaagaagaagctgctacaaatcatcgacaccaccctgctcaagtgctatctccatacaaatgtggccctggtggcccccttgctacgcctggagaacaatcactgccacatcgaggagagcgagcacgtgctaaagaaggctcacaagtacagtgagcttatcatcctgtatgagaagaaggggctccacgagaaagctctgcaggtgctcgtggaccagtccaagaaagccaactcccctctgaaaggccacgagaggacagtgcagtatctgcagcatctgggcacagaaaacctgcatttgattttctcctactcagtgtgggtgctgagagacttcccagaagatggcctgaagatatttactgaagatctcccggaagtggagtctctgccacgtgatcgagtcctcggcttcttaatagagaattttaagggtctggctattccttatctggaacacatcatccatgtttgggaggagacaggctctcggttccacaactgcctgatccagctatactgtgagaaggtgcaaggtctgatgaaggagtatctcctgtccttccctgcaggcaaaaccccagtcccagctggagaggaagagggtgagctgggagaataccggcaaaagctcctcatgttcttggagatttccagctactatgatccaggccggctcatctgtgattttccctttgatggcctcttagaagaacgagctctcctgttggggcgcatggggaaacatgaacaagctcttttcatttatgtccacatcttgaaggatacaaggatggctgaggagtactgccacaaacactatgaccgaaacaaagatggcaacaaagatgtgtatctgtccctgcttcggatgtacctgtcgccccccagcattcactgcctggggccaatcaagctggaactactggagccaaaagccaacctccaggccgctctgcaggtcctcgagctacaccacagcaaactggacaccaccaaggccctcaaccttctgccagcaaacactcagatcaatgacatacgcatcttcctggaaaaggtcttggaagaaaatgcacaaaagaaacggttcaatcaagtgctcaagaaccttctccatgcagaattcctgagggtccaggaagagcggattttacaccagcaggtgaagtgcatcatcacagaggagaaggtgtgcatggtgtgtaagaagaagattgggaacagtgcatttgcaagataccccaatggagtggtcgtccattacttctgttccaaagaggtaaacccagctgacacttgagcccagcatcctggggatccagcggatggacagcttggctctcccagagaggtgaaggagcacctggccttaggaatcctggctgccaccaccacaaggctccccatttggacattactggctatcttgtgccctggaacaactctgaattaattagactcatggtctggcattgccagctttttaatgggaaaagagattagttataccttataccattatgttgtgggcaattccagagaattcagtacctgcttggtcaggaggatgtgcaccatcttgcctttgcacaccagtcacctgaacaaggaaacttgtcacaagtgtttgtaaccatggggttgttcatcaagggcttttctattaagtacatgacttcacaaggaccgctcagcatggctcactggagagttccatgagagaacagcactcaagcttctggccgcatggacccg

SEQ ID NO: 7474 - protein, 875 aa, Homo sapiens; identical to SEQ ID NO: 1026

SEQ ID NO: 7475 - DNA, 2992 bp, Homo sapiens
atgcacgacgctttcgagccagtgccgatcctagaaaagctgcctctgcaaatcgactgtctggctgcctgggaggaatggcttcttgtgggaaccaaacaaggacatcttcttctctataggattcggaaggacgttgtgccagcagatgtagcatcacctgaaagcggcagttgcaacagatttgaagtgacactagagaaatccaataagaacttctccaaaaagattcagcagatccatgtggtttcccagtttaagattctggtcagcttgttagaaaataacatttatgtccatgacctattgacatttcaacaaatcactacggtttcaaaggcaaagggagcatcactgtttacttgtgacctccagcacacagagaccggtgaggaggtgttacggatgtgtgtggcagtaaaaaagaagctgcagctctatttctggaaggacagggaatttcatgaattgcagggggactttagtgtgccagatgtgcccaagtccatggcgtggtgtgaaaattctatctgtgtgggtttcaagagagactactacctaataagggtggatggaaaggggtccatcaaagagctctttccaacaggaaaacagctggagcccttagttgcacctctggcagatggaaaagtggctgtgggccaggatgatctcaccgtggtactcaatgaggaagggatctgcacacagaaatgtgccctgaactggacggacataccagtggccatggagcaccagcctccctacatcattgcagtgttgcctcgatatgttgagatccgaacatttgaaccgaggcttctggtccaaagcattgaattgcaaaggccccgtttcattacctcaggaggatcaaacattatctatgtggccagcaatcattttgtttggagactcatccctgtccccatggcaacccaaatccaacaacttctccaggacaagcagtttgaattggctctgcagctcgcagaaatgaaagatgattctgacagtgaaaagcagcaacaaattcatcacatcaagaacttgtatgccttcaacctcttctgccagaagcgttttgatgagtccatgcaggtctttgctaaacttggcacagatcccacccatgtgatgggcctgtaccctgacctgctgcccacagactacagaaagcagttgcagtatcccaacccattgcctgtgctctccggggctgaattggagaaggctcacttagctctgattgactacctgacacagaaacgaagtcaattggtaaagaagctgaatgactctgatcaccagtcaagcacctcaccgctcatggaaggcactcccaccatcaaatccaagaagaagctgctacaaatcatcgacaccaccctgctcaagtgctatctccatacaaatgtggccctggtggcccccttgctacgcctggagaacaatcactgccacatcgaggagagcgagcacgtgctaaagaaggctcacaagtacagtgagcttatcatcctgtatgagaagaaggggctccacgagaaagctctgcaggtgctcgtggaccagtccaagaaagccaactcccctctgaaaggccacgagaggacagtgcagtatctgcagcatctgggcacagaaaacctgcatttgattttctcctactcagtgtgggtgctgagagacttcccagaagatggcctgaagatatttactgaagatctcccggaagtggagtctctgccacgtgatcgagtcctcggcttcttaatagagaattttaagggtctggctattccttatctggaacacatcatccatgtttgggaggagacaggctctcggttccacaactgcctgatccagctatactgtgagaaggtgcaaggtctgatgaaggagtatctcctgtccttccctgcaggcaaaaccccagtcccagctggagaggaagagggtgagctgggagaataccggcaaaagctcctcatgttcttggagatttccagctactatgatccaggccggctcatctgtgattttccctttgatggcctcttagaagaacgagctctcctgttggggcgcatggggaaacatgaacaagctcttttcatttatgtccacatcttgaaggatacaaggatggctgaggagtactgccacaaacactatgaccgaaacaaagatggcaacaaagatgtgtatctgtccctgcttcggatgtacctgtcgccccccagcattcactgcctggggccaatcaagctggaactactggagccaaaagccaacctccaggccgctctgcaggtcctcgagctacaccacagcaaactggacaccaccaaggccctcaaccttctgccagcaaacactcagatcaatgacatacgcatcttcctggaaaaggtcttggaagaaaatgcacaaaagaaacggttcaatcaagtgctcaagaaccttctccatgcagaattcctgagggtccaggaagagcggattttacaccagcaggtgaagtgcatcatcacagaggagaaggtgtgcatggtgtgtaagaagaagattgggaacagtgcatttgcaagataccccaatggagtggtcgtccattacttctgttccaaagaggtaaacccagctgacacttgagcccagcatcctggggatccagcggatggacagcttggctctcccagagaggtgaaggagcacctggccttaggaatcctggctgccaccaccacaaggctccccatttggacattactggctatcttgtgccctggaacaactctgaattaattagactcatggtctggcattgccagctttttaatgggaaaagagattagttataccttataccattatgttgtgggcaattccagagaattcagtacctgcttggtcaggaggatgtgcaccatcttgcctttgcacaccagtcacctgaacaaggaaacttgtcacaagtgtttgt

SEQ ID NO: 7476 - protein, 886 aa, Homo sapiens; identical to SEQ ID NO: 7466

SEQ ID NO: 7477 - DNA, 429 bp, Homo sapiens
cctttctggtcatgtggtgacatccttgaaccccattcccttcatttttcttgatgaccctacattgccacctggcagtgtcctttcattttgagcttggtttcccttaaaggcaaaaccccagtcccagctggagaggaagagggtgagctgggagaataccggcaaaagctcctcatgttcttggagatttccagctactatgatccaggccggctcatctgtgattttccctttgatggcctcttagaagaacgagctctcctgttggggcgcatggggaaacatgaacaagctcttttcatttatgtccacatcttgaaggatacaaggatggctgaggagtaagtttgccccaacatcccacctcctaagcagtctaaaagcaggccctgcagagagatgagagttaagaaggccatctcccca

SEQ ID NO: 7478 - protein, 56 aa, Homo sapiens
MFLEISSYYDPGRLICDFPFDGLLEERALLLGRMGKHEQALFIYVHILKDTRMAEE

SEQ ID NO: 7479 - DNA, 2709 bp, Homo sapiens
agaactgaacgcgcagcccatgcggagtggcctattgaaggaagcccagtcctctgggttttagagatttaggccccctcccgccttttgatccccaaattttattgtgttgggcggttctaggggacgtgaggtaaagatttagcaacaagtcccagcgatttggggcttggaagtggccaggaagaatcggcgacttaggaaaaacgccaacaatacggagtttcagaatcatctgtaagaggcctggaatccagaggcacccaagggaattagcaacaagaaatacataagagatgccaaaggccagtacctgtttgaccttctttgccaccatctgaacctacttgagaaagactattttggtatccgctttgtagacccagataagcagcggcattggctggaatttacaaagtctgtggtgaaacaattgagatcccagcctccattcaccatgtgcttccgtgtgaagttttatcctgcagaccctgctgctctgaaagaagaaataaccaggtatttagtcttcctgcagatcaaaagggatctctaccatggccgactcctctgtaaaacatcggatgctgccttgttagcagcttacatccttcaagcggagattggggattatgactcagggaaacaccctgaaggctacagctccaagttccagtttttccctaaacattcagagaagctggaaaggaaaattgctgagattcacaagacggaactgagtggtcaaacaccagcaacatcagagctgaacttcttaagaaaagcacagacattggaaacatatggagtggatcctcacccatgtaaggacgtgtcaggaaatgctgcatttctggccttcactccttttgggtttgttgttcttcaaggaaacaagagggtccacttcattaaatggaatgaggtgaccaagctgaaatttgaaggaaagactttctatttatacgtaagtcagaaagaggaaaagaaaattattcttacatattttgctccaactcctgaagcgtgtaagcacctctggaaatgtggaatcgagaaccaagccttctacaagctggagaagtcaagccaagtccgcacagtgtccagcagcaatttattctttaaagggagccggttccgatacagtggccgagttgcaaaggaagtcatggaatcaagtgctaagatcaaacgggagccaccggaaatacacagagcagggatggttcccagccggagctgtccctccataacccatggcccaaggctgagcagcgtccccaggacccgcagaagagctgttcacatctccatcatggaaggcctagagtccttacgggacagtgcccattccacaccagtgcgttccacttcccatggggacaccttcctgcctcacgtgagaagcagccggacagatagcaatgagcgagtagctgtgattgcagacgaggcctacagccctgcagacagcgtgctgcccacccctgtggctgagcacagcctggagctgatgttgctttcccggcagatcaatggagccacctgcagcattgaggaggagaaggaatctgaagccagcaccccaactgctacagaggtggaggcccttgggggagagctgagggccctgtgtcaggggcacagcgggcccgaggaggaacaggcgatggtttgcctgcaaaatccgctcagtggtgagcctgctcattgacacctgagaaggcatgactcctcccaaaaactagccaggtggaccaaggaacccggctacccattcccagcaatgggacccatcgcggaaccatcggcacatataccaagtcctcctctcatgactcaaagtccactgcagcctaggagggtgtttcccagaagaagaaagggataggctcatgccctgtctaaacaaactgggaaaactcattttcttcagaagttatttcaagaaaggctcagcgactctgtttctcatctttccaatttgcaggataatttttggttttgaattttgatttttcatagatgtatattattttgaagtatcaaataaaaataatttattttactattactgattattgcagtagtatcacctagcagaggggacactagttgaaaactagagagctgctgtcctctgtattctgcaggagcttttcctgctggtgccactgggttccagtagactcatcactgcagcctcagcagggcaggccagggatctggacaatggggactgtttagttttttgtttgttttttttgccagccagaacttttaaaaaagtaaacatccatgtagaatgattaaatggaaagttgcttcttatgatggtctgagttggattttcttttccttttgttttttcaaatctgagcagagtgggcatctgaagggaccaccgctacagcaacagcagcatcaggggtggggtaagtctgtccccttagtctagagcctagtgggcatcaccatagttttgtataatgaaactagacttaacgtgattttttttttccgaagaacctcaagacttttatagtgctccaggggcgttaaacgaattcagtggtaccagagatagatagttctgtcagaaatgttggacaaagtgtagttaagagaaagcagagttaagttacctgagagactgttgagatttggatagcagtgcttattttatatacacccccttgacccaaa

SEQ ID NO: 7480 - protein, 419 aa, Homo sapiens
MCFRVKFYPADPAALKEEITRYLVFLQIKRDLYHGRLLCKTSDAALLAAYILQAEIGDYDSGKHPEGYSSKFQFFPKHSEKLERKIAEIHKTELSGQTPATSELNFLRKAQTLETYGVDPHPCKDVSGNAAFLAFTPFGFVVLQGNKRVHFIKWNEVTKLKFEGKTFYLYVSQKEEKKIILTYFAPTPEACKHLWKCGIENQAFYKLEKSSQVRTVSSSNLFFKGSRFRYSGRVAKEVMESSAKIKREPPEIHRAGMVPSRSCPSITHGPRLSSVPRTRRRAVHISIMEGLESLRDSAHSTPVRSTSHGDTFLPHVRSSRTDSNERVAVIADEAYSPADSVLPTPVAEHSLELMLLSRQINGATCSIEEEKESEASTPTATEVEALGGELRALCQGHSGPEEEQAMVCLQNPLSGEPAH

SEQ ID NO: 7481 - DNA, 3356 bp, Homo sapiens
gagaggtatccgcattctgcaggtgcagggactgtgatccagcaccctgccgcctcctcgctccggctcccaagagggcgggaaccgcggtgttgcagggtgcgaggcttggcttcggaaacgcagatcaagtgtatttcaggcggcagacatcaatccagttgggtgctcacacctggcccgggggaggggaaacagcatccataggaaccacggggcggagaggaacccctcgtttgggacgctagagggctgctccggcttgactaggtccgactgcttttctgtgattgcttctttatcccgcccatcatcccagtactctatctcgattggcttttcggtctgccactcggttccgccgcgctgacccccattggccccctccagttgaggccccgccccgcgagctgggcacgggcactggggcgccgaggagacagagcccggcgcttgatctgggctggggggaggcggtggcggctgagggaaggaggaggataaggaggaggaacgaggccagcaggaggcaacggcagcgacggggccggggtgatggtgcaggtgcctggggtcggtgcggagctgccgggctgagggacgcctggtccagggtccgcagcgccgccgcgtcgctcccgggcgggcgggcgggaagatgctgagcaggttgatgagcggcagcagcaggagcctggagcgcgagtacagctgcaccgtgcggctgctggacgacagcgagtacacctgcaccatccagagagatgccaaaggccagtacctgtttgaccttctttgccaccatctgaacctacttgagaaagactattttggtatccgctttgtagacccagataagcagcggcattggctggaatttacaaagtctgtggtgaaacaattgagatcccagcctccattcaccatgtgcttccgtgtgaagttttatcctgcagaccctgctgctctgaaagaagaaataaccaggtatttagtcttcctgcagatcaaaagggatctctaccatggccgactcctctgtaaaacatcggatgctgccttgttagcagcttacatccttcaagcggagattggggattatgactcagggaaacaccctgaaggctacagctccaagttccagtttttccctaaacattcagagaagctggaaaggaaaattgctgagattcacaagacggaactgagtggtcaaacaccagcaacatcagagctgaacttcttaagaaaagcacagacattggaaacatatggagtggatcctcacccatgtaaggacgtgtcaggaaatgctgcatttctggccttcactccttttgggtttgttgttcttcaaggaaacaagagggtccacttcattaaatggaatgaggtgaccaagctgaaatttgaaggaaagactttctatttatacgtaagtcagaaagaggaaaagaaaattattcttacatattttgctccaactcctgaagcgtgtaagcacctctggaaatgtggaatcgagaaccaagccttctacaagctggagaagtcaagccaagtccgcacagtgtccagcagcaatttattctttaaagggagccggttccgatacagtggccgagttgcaaaggaagtcatggaatcaagtgctaagatcaaacgggagccaccggaaatacacagagcagggatggttcccagccggagctgtccctccataacccatggcccaaggctgagcagcgtccccaggacccgcagaagagctgttcacatctccatcatggaaggcctagagtccttacgggacagtgcccattccacaccagtgcgttccacttcccatggggacaccttcctgcctcacgtgagaagcagccggacagatagcaatgagcgagtagctgtgattgcagacgaggcctacagccctgcagacagcgtgctgcccacccctgtggctgagcacagcctggagctgatgttgctttcccggcagatcaatggagccacctgcagcattgaggaggagaaggaatctgaagccagcaccccaactgctacagaggtggaggcccttgggggagagctgagggccctgtgtcaggggcacagcgggcccgaggaggaacaggtgaataagtttgttctaagtgtcctccgtttgctccttgtgaccatgggactcctctttgttttgctcctcctcctgatcatccttaccgagtctgaccttgacattgcctttttccgtgatatccgccagacccccgagtttgaacaattccactatcaatacttttgtcccctcaggcgatggtttgcctgcaaaatccgctcagtggtgagcctgctcattgacacctgagaaggcatgactcctcccaaaaactagccaggtggaccaaggaacccggctacccattcccagcaatgggacccatcgcggaaccatcggcacatataccaagtcctcctctcatgactcaaagtccactgcagcctaggagggtgtttcccagaagaagaaagggataggctcatgccctgtctaaacaaactgggaaaactcattttcttcagaagttatttcaagaaaggctcagcgactctgtttctcatctttccaatttgcaggataatttttggttttgaattttgatttttcatagatgtatattattttgaagtatcaaataaaaataatttattttactattactgattattgcagtagtatcacctagcagaggggacactagttgaaaactagagagctgctgtcctctgtattctgcaggagcttttcctgctggtgccactgggttccagtagactcatcactgcagcctcagcagggcaggccagggatctggacaatggggactgtttagttttttgtttgttttttttgccagccagaacttttaaaaaagtaaacatccatgtagaatgattaaatggaaagttgcttcttatgatggtctgagttggattttcttttccttttgttttttcaaatctgagcagagtgggcatctgaagggaccaccgctacagcaacagcagcatcaggggtggggtaagtctgtccccttagtctagagcctagtgggcatcaccatagttttgtataatgaaactagacttaacgtgattttttttttccgaagaacctcaagacttttatagtgctccaggggcgttaaacgaattcagtggtaccagagatagatagttctgtcagaaatgttggacaaagtgtagttaagagaaagcagagttaagttacctgagagactgttgagatttggatagcagtgcttattttatatacacccccttgacccaaa

SEQ ID NO: 7482 - protein, 570 aa, Homo sapiens; identical to SEQ ID NO: 1028

SEQ ID NO: 7483 - DNA, 2818 bp, Homo sapiens
ggctgagggaaggaggaggataaggaggaggaacgaggccagcaggaggcaacggcagcgacggggccggggtgatggtgcaggtgcctggggtcggtgcggagctgccgggctgagggacgcctggtccagggtccgcagcgccgccgcgtcgctcccgggcgggcgggcgggaagatgctgagcaggttgatgagcggcagcagcaggagcctggagcgcgagtacagctgcaccgtgcggctgctggacgacagcgagtacacctgcaccatccagagagatgccaaaggccagtacctgtttgaccttctttgccaccatctgaacctacttgagaaagactattttggtatccgctttgtagacccagataagcagcggcattggctggaatttacaaagtctgtggtgaaacaattgagatcccagcctccattcaccatgtgcttccgtgtgaagttttatcctgcagaccctgctgctctgaaagaagaaataaccagtgcagtcgcaacagagtggacttctttccttcaagaagtgtgaatactacctcttgaactggtcactctcaaagggctctggagtaactaatcagaagcgtcttttcttttacctatgatgttgccactgtggacatttttggagagagctatgttgctgcttatttcggaggttgcaaatagattcaagtggtctaatggatatacttggaaaatgccaaaggcataacactgaaagataagctgggagatactgaagatttaaaatcaaaatggataaactctgtggtgctgttggatcaggcatagaagccccaggctctgctcatctatgtggaagtggaggtggctcttgctttgcttcagaaaaccaaatccatccaaatcatagacaccctaaggctttaggtatttagtcttcctgcagatcaaaagggatctctaccatggccgactcctctgtaaaacatcggatgctgccttgttagcagcttacatccttcaagcggagattggggattatgactcagggaaacaccctgaaggctacagctccaagttccagtttttccctaaacattcagagaagctggaaaggaaaattgctgagattcacaagacggaactgagtggtcaaacaccagcaacatcagagctgaacttcttaagaaaagcacagacattggaaacatatggagtggatcctcacccatgtaaggaatgaggtgaccaagctgaaatttgaaggaaagactttctatttatacgtaagtcagaaagaggaaaagaaaattattcttacatattttgctccaactcctgaagcgtgtaagcacctctggaaatgtggaatcgagaaccaagccttctacaagctggagaagtcaagccaagtccgcacagtgtccagcagcaatttattctttaaagggagccggttccgatacagtggccgagttgcaaaggaagtcatggaatcaagtgctaagatcaaacgggagccaccggaaatacacagagcagggatggttcccagccggagctgtccctccataacccatggcccaaggctgagcagcgtccccaggacccgcagaagagctgttcacatctccatcatggaaggcctagagtccttacgggacagtgcccattccacaccagtgcgttccacttcccatggggacaccttcctgcctcacgtgagaagcagccggacagatagcaatgagcgagtagctgtgattgcagacgaggcctacagccctgcagacagcgtgctgcccacccctgtggctgagcacagcctggagctgatgttgctttcccggcagatcaatggagccacctgcagcattgaggaggagaaggaatctgaagccagcaccccaactgctacagaggtggaggcccttgggggagagctgagggccctgtgtcaggggcacagcgggcccgaggaggaacaggtgaataagtttgttctaagtgtcctccgtttgctccttgtgaccatgggactcctctttgttttgctcctcctcctgatcatccttaccgagtctgaccttgacattgcctttttccgtgatatccgccagacccccgagtttgaacaattccactatcaatacttttgtcccctcaggcgatggtttgcctgcaaaatccgctcagtggtgagcctgctcattgacacctgagaaggcatgactcctcccaaaaactagccaggtggaccaaggaacccggctacccattcccagcaatgggacccatcgcggaaccatcggcacatataccaagtcctcctctcatgactcaaagtccactgcagcctaggagggtgtttcccagaagaagaaagggataggctcatgccctgtctaaacaaactgggaaaactcattttcttcagaagttatttcaagaaaggctcagcgactctgtttctcatctttccaatttgcaggataatttttggttttgaattttgatttttcatagatgtatattattttgaagtatcaaataaaaataatttattttactattactgattattgcagtagtatcacctagcagaggggacactagttgaaaactagagagctgctgtcctctgtattctgcaggagcttttcctgctggtgccactgggttccagtagactcatcactgcagcctcagcagggcaggccagggatctggacaatggggactgtttagttttttgtttgttttttttgccagccagaacttttaaaaaagtaaacatccatgtagaatgattaaatggaaagttgcttctt

SEQ ID NO: 7484 - protein, 336 aa, Homo sapiens
MEWILTHVRNEVTKLKFEGKTFYLYVSQKEEKKIILTYFAPTPEACKHLWKCGIENQAFYKLEKSSQVRTVSSSNLFFKGSRFRYSGRVAKEVMESSAKIKREPPEIHRAGMVPSRSCPSITHGPRLSSVPRTRRRAVHISIMEGLESLRDSAHSTPVRSTSHGDTFLPHVRSSRTDSNERVAVIADEAYSPADSVLPTPVAEHSLELMLLSRQINGATCSIEEEKESEASTPTATEVEALGGELRALCQGHSGPEEEQVNKFVLSVLRLLLVTMGLLFVLLLLLIILTESDLDIAFFRDIRQTPEFEQFHYQYFCPLRRWFACKIRSVVSLLIDT

SEQ ID NO: 7485 - DNA, 2802 bp, Homo sapiens
ggctgagggaaggaggaggataaggaggaggaacgaggccagcaggaggcaacggcagcgacggggccggggtgatggtgcaggtgcctggggtcggtgcggagctgccgggctgagggacgcctggtccagggtccgcagcgccgccgcgtcgctcccgggcgggcgggcgggaagatgctgagcaggttgatgagcggcagcagcaggagcctggagcgcgagtacagctgcaccgtgcggctgctggacgacagcgagtacacctgcaccatccagagagatgccaaaggccagtacctgtttgaccttctttgccaccatctgaacctacttgagaaagactattttggtatccgctttgtagacccagataagcagcggcattggctggaatttacaaagtctgtggtgaaacaattgagatcccagcctccattcaccatgtgcttccgtgtgaagttttatcctgcagaccctgctgctctgaaagaagaaataaccagtgcagtcgcaacagagtggacttctttccttcaagaagtgtgaatactacctcttgaactggtcactctcaaagggctctggagtaactaatcagaagcgtcttttcttttacctatgatgttgccactgtggacatttttggagagagctatgttgctgcttatttcggaggttgcaaatagattcaagtggtctaatggatatacttggaaaatgccaaaggcataacactgaaagataagctgggagatactgaagatttaaaatcaaaatggataaactctgtggtgctgttggatcaggtatttagtcttcctgcagatcaaaagggatctctaccatggccgactcctctgtaaaacatcggatgctgccttgttagcagcttacatccttcaagcggagattggggattatgactcagggaaacaccctgaaggctacagctccaagttccagtttttccctaaacattcagagaagctggaaaggaaaattgctgagattcacaagacggaactgagtggtcaaacaccagcaacatcagagctgaacttcttaagaaaagcacagacattggaaacatatggagtggatcctcacccatgtaaggacgtgtcaggaaatgctgcatttctggccttcactccttttgggtttgttgttcttcaaggaaacaagagggtccacttcattaaatggaatgaggtgaccaagctgaaatttgaaggaaagactttctatttatacgtaagtcagaaagaggaaaagaaaattattcttacatattttgctccaactcctgaagcgtgtaagcacctctggaaatgtggaatcgagaaccaagccttctacaagctggagaagtcaagccaagtccgcacagtgtccagcagcaatttattctttaaagggagccggttccgatacagtggccgagttgcaaaggaagtcatggaatcaagtgctaagatcaaacgggagccaccggaaatacacagagcagggatggttcccagccggagctgtccctccataacccatggcccaaggctgagcagcgtccccaggacccgcagaagagctgttcacatctccatcatggaaggcctagagtccttacgggacagtgcccattccacaccagtgcgttccacttcccatggggacaccttcctgcctcacgtgagaagcagccggacagatagcaatgagcgagtagctgtgattgcagacgaggcctacagccctgcagacagcgtgctgcccacccctgtggctgagcacagcctggagctgatgttgctttcccggcagatcaatggagccacctgcagcattgaggaggagaaggaatctgaagccagcaccccaactgctacagaggtggaggcccttgggggagagctgagggccctgtgtcaggggcacagcgggcccgaggaggaacaggtgaataagtttgttctaagtgtcctccgtttgctccttgtgaccatgggactcctctttgttttgctcctcctcctgatcatccttaccgagtctgaccttgacattgcctttttccgtgatatccgccagacccccgagtttgaacaattccactatcaatacttttgtcccctcaggcgatggtttgcctgcaaaatccgctcagtggtgagcctgctcattgacacctgagaaggcatgactcctcccaaaaactagccaggtggaccaaggaacccggctacccattcccagcaatgggacccatcgcggaaccatcggcacatataccaagtcctcctctcatgactcaaagtccactgcagcctaggagggtgtttcccagaagaagaaagggataggctcatgccctgtctaaacaaactgggaaaactcattttcttcagaagttatttcaagaaaggctcagcgactctgtttctcatctttccaatttgcaggataatttttggttttgaattttgatttttcatagatgtatattattttgaagtatcaaataaaaataatttattttactattactgattattgcagtagtatcacctagcagaggggacactagttgaaaactagagagctgctgtcctctgtattctgcaggagcttttcctgctggtgccactgggttccagtagactcatcactgcagcctcagcagggcaggccagggatctggacaatggggactgtttagttttttgtttgttttttttgccagccagaacttttaaaaaagtaaacatccatgtagaatgattaaatggaaagttgcttctt

SEQ ID NO: 7486 - protein, 243 aa, Homo sapiens
MESSAKIKREPPEIHRAGMVPSRSCPSITHGPRLSSVPRTRRRAVHISIMEGLESLRDSAHSTPVRSTSHGDTFLPHVRSSRTDSNERVAVIADEAYSPADSVLPTPVAEHSLELMLLSRQINGATCSIEEEKESEASTPTATEVEALGGELRALCQGHSGPEEEQVNKFVLSVLRLLLVTMGLLFVLLLLLIILTESDLDIAFFRDIRQTPEFEQFHYQYFCPLRRWFACKIRSVVSLLIDT

SEQ ID NO: 7487 - DNA, 2242 bp, Homo sapiens
ggctgagggaaggaggaggataaggaggaggaacgaggccagcaggaggcaacggcagcgacggggccggggtgatggtgcaggtgcctggggtcggtgcggagctgccgggctgagggacgcctggtccagggtccgcagcgccgccgcgtcgctcccgggcgggcgggcgggaagatgctgagcaggttgatgagcggcagcagcaggagcctggagcgcgagtacagctgcaccgtgcggctgctggacgacagcgagtacacctgcaccatccagagagatgccaaaggccagtacctgtttgaccttctttgccaccatctgaacctacttgagaaagactattttggtatccgctttgtagacccagataagcagcggcattggctggaatttacaaagtctgtggtgaaacaattgagatcccagcctccattcaccatgtgcttccgtgtgaagttttatcctgcagaccctgctgctctgaaagaagaaataaccaggtatttagtcttcctgcagatcaaaagggatctctaccatggccgactcctctgtaaaacatcggatgctgccttgttagcagcttacatccttcaagcggagattggggattatgactcagggaaacaccctgaaggctacagctccaagttccagtttttccctaaacattcagagaagctggaaaggaaaattgctgagattcacaagacggaactgagtggtcaaacaccagcaacatcagagctgaacttcttaagaaaagcacagacattggaaacatatggagtggatcctcacccatgtaaggacgtgtcaggaaatgctgcatttctggccttcactccttttgggtttgttgttcttcaaggaaacaagagggtccacttcattaaatggaatgaggtgaccaagctgaaatttgaaggaaagactttctatttatacgtaagtcagaaagaggaaaagaaaattattcttacatattttgctccaactcctgaagcgtgtaagcacctctggaaatgtggaatcgagaaccaagccttctacaagctggagaagtcaagccaagtccgcacagtgtccagcagcaatttattctttaaagggagccggttccgatacagtggccgagttgcaaaggaagtcatggaatcaagtgctaagatcaaacgggagccaccggaaatacacagagcagggatggttcccagccggagctgtccctccataacccatggcccaaggctgagcagcgtccccaggacccgcagaagagctgttcacatctccatcatggaaggcctagagtccttacgggacagtgcccattccacaccagtgcgttccacttcccatggggacaccttcctgcctcacgtgagaagcagccggacagatagcaatgagcgagtagctgtgattgcagacgaggcctacagccctgcagacagcgtgctgcccacccctgtggctgagcacagcctggagctgatgttgctttcccggcagatcaatggagccacctgcagcattgaggaggagaaggaatctgaagccagcaccccaactgctacagaggtggaggcccttgggggagagctgagggccctgtgtcaggggcacagcgggcccgaggaggaacaggtgaataagtttgttctaagtgtcctccgtttgctccttgtgaccatgggactcctctttgttttgctcctcctcctgatcatccttaccgagtctgaccttgacattgcctttttccgtgatatccgccagacccccgagtttgaacaattccactatcaatacttttgtcccctcaggcgatggtttgcctgcaaaatccgctcagtggtgagcctgctcattgacacctgagaaggcatgactcctcccaaaaactagccaggtggaccaaggaacccggctacccattcccagcaatgggacccatcgcggaaccatcggcacatataccaagtcctcctctcatgactcaaagtccactgcagcctaggagggtgtttcccagaagaagaaagggataggctcatgccctgtctaaacaaactgggaaaactcattttcttcagaagttatttcaagaaaggctcagcgactctgtttctcatctttccaatttgcaggataatttttggttttgaattttgatttttcatagatgtatattattttgaagtatcaaataaaaataatttattttactatt

SEQ ID NO: 7488 - protein, 570 aa, Homo sapiens; identical to SEQ ID NO: 1028

SEQ ID NO: 7489 - DNA, 1189 bp, Homo sapiens
ccgtgaggtgttgggtttgggggacgctggcagctgggttctcccggttcccttgggcaggtgcagggtcgggttcaaagcctccggaacgcgttttggcctgatttgaggaggggggcggggagggacctgcggcttgcggccccgcccccttctccggctcgcagccgaccggtaagcccgcctcctccctcggccggccctggggccgtgtccgccgggcaactccagccgaggcctgggcttctgcctgcaggtgtctgcggcgaggcccctagggtacagcccgatttggccccatggtgggtttcggggccaaccggcgggctggccgcctgccctctctcgtgctggtggtgctgctggtggtgatcgtcgtcctcgccttcaactactggagcatctcctcccgccacgtcctgcttcaggaggaggtggccgagctgcagggccaggtccagcgcaccgaagtggcccgcgggcggctggaaaagcgcaattcggacctcttgctgttggtggacacgcacaagaaacagatcgaccagaaggaggccgactacggccgcctcagcagccggctgcaggccagagagggcctcgggaagagatgcgaggatgacaaggttaaactacagaacaacatatcgtatcagatggcagacatacatcatttaaaggagcaacttgctgagcttcgtcaggaatttcttcgacaagaagaccagcttcaggactataggaagaacaatacttaccttgtgaagaggttagaatatgaaagttttcagtgtggacagcagatgaaggaattgagagcacagcatgaagaaaatattaaaaagttagcagaccagtttttagaggaacaaaagcaagagacccaaaagattcaatcaaatgatggaaaggaattggatataaacaatcaagtagtacctaaaaatattccaaaagtagctgagaatgttgcagataagaatgaagaaccctcaagcaatcatattccacatgggaaagaacaaatcaaaagaggtggtgatgcagggatgcctggaatagaagagaatgacctagcaaaagttgatgatcttccccctggtaagtaaaaattgttagagaattcgactaaagtgatgataatacatttcatgtgaccccattctctttttcggtaacacttggaaaa

SEQ ID NO: 7490 - protein, 269 aa, Homo sapiens [sequence omitted]

SEQ ID NO: 7491 - DNA, 1368 bp, Homo sapiens
ccgtgaggtgttgggtttgggggacgctggcagctgggttctcccggttcccttgggcaggtgcagggtcgggttcaaagcctccggaacgcgttttggcctgatttgaggaggggggcggggagggacctgcggcttgcggccccgcccccttctccggctcgcagccgaccggtaagcccgcctcctccctcggccggccctggggccgtgtccgccgggcaactccagccgaggcctgggcttctgcctgcaggtgtctgcggcgaggcccctagggtacagcccgatttggccccatggtgggtttcggggccaaccggcgggctggccgcctgccctctctcgtgctggtggtgctgctggtggtgatcgtcgtcctcgccttcaactactggagcatctcctcccgccacgtcctgcttcaggaggaggtggccgagctgcagggccaggtccagcgcaccgaagtggcccgcgggcggctggaaaagcgcaattcggacctcttgctgttggtggacacgcacaagaaacagatcgaccagaaggaggccgactacggccgcctcagcagccggctgcaggccagagagggcctcgggaagagatgcgaggatgacaaggttaaactacagaacaacatatcgtatcagatggcagacatacatcatttaaaggagcaacttgctgagcttcgtcaggaatttcttcgacaagaagaccagcttcaggactataggaagaacaatacttaccttgtgaagaggttagaatatgaaagcaagagacccaaaagattcaatcaaatgatggaaaggaattggatataaacaatcaagtagtacctaaaaatattccaaaagtagctgagaatgttgcagataagaatgaagaaccctcaagcaatcatattccacatgggaaagaacaaatcaaaagaggtggtgatgcagggatgcctggaatagaagagaatgacctagcaaaagttgatgatcttccccctggccctggttcccagacatcatctctgaacctgctgggggaatttgccaccctgaaaggaaggacacaagcccagctggcttcatcatctgctgattgtggagctctagggccttgagcaaacatatgtggtagccaggtagtggttacagcaggccttggtaagacccagtgctgtattggcttcaggtctaacccagcacagttctaatggtggtgccacagtggtacatgcctatagtcccagctactccagaagctgaggtgggaagatcacttgagcctgggagattgaggctgcagtgagctgagatcatgccattgcactccagcttgggcaccagagcaagaccttgtctc

SEQ ID NO: 7492 - protein, 177 aa, Homo sapiens
MVGFGANRRAGRLPSLVLVVLLVVIVVLAFNYWSISSRHVLLQEEVAELQGQVQRTEVARGRLEKRNSDLLLLVDTHKKQIDQKEADYGRLSSRLQAREGLGKRCEDDKVKLQNNISYQMADIHHLKEQLAELRQEFLRQEDQLQDYRKNNTYLVKRLEYESKRPKRFNQMMERNWI

SEQ ID NO: 7493 - DNA, 1762 bp, Homo sapiens
ccgtgaggtgttgggtttgggggacgctggcagctgggttctcccggttcccttgggcaggtgcagggtcgggttcaaagcctccggaacgcgttttggcctgatttgaggaggggggcggggagggacctgcggcttgcggccccgcccccttctccggctcgcagccgaccggtaagcccgcctcctccctcggccggccctggggccgtgtccgccgggcaactccagccgaggcctgggcttctgcctgcaggtgtctgcggcgaggcccctagggtacagcccgatttggccccatggtgggtttcggggccaaccggcgggctggccgcctgccctctctcgtgctggtggtgctgctggtggtgatcgtcgtcctcgccttcaactactggagcatctcctcccgccacgtcctgcttcaggaggaggtggccgagctgcagggccaggtccagcgcaccgaagtggcccgcgggcggctggaaaagcgcaattcggacctcttgctgttggtggacacgcacaagaaacagatcgaccagaaggaggccgactacggccgcctcagcagccggctgcaggccagagagggcctcgggaagagatgcgaggatgacaaggttaaactacagaacaacatatcgtatcagatggcagacatacatcatttaaaggagcaacttgctgagcttcgtcaggaatttcttcgacaagaagaccagcttcaggactataggaagaacaatacttaccttgtgaagaggttagaatatgaaagttttcagtgtggacagcagatgaaggaattgagagcacagcatgaagaaaatattaaaaagttagcagaccagtttttagaggaacaaaagcaagagacccaaaagattcaatcaaatgatggaaaggaattggatataaacaatcaagtagtacctaaaaatattccaaaagtagctgagaatgttgcagataagaatgaagaaccctcaagcaatcatattccacatgggaaagaacaaatcaaaagaggtggtgatgcagggatgcctggaatagaagagaatgacctagcaaaagttgatgatcttccccctgctttaaggaagcctcctatttcagtttctcaacatgaaagtcatcaagcaatctcccatcttccaactggacaacctctctccccaaatatgcctccagattcacacataaaccacaatggaaaccccggtacttcaaaacagaatccttccagtcctcttcagcgtttaattccaggctcaaacttggacagtgaacccagaattcaaacagatatactaaagcaggctaccaaggacagagtcagtgatttccataaattgaagcaaagccgattctttgatgaaaatgaatcccctgttgatccgcagcatggctctaaactggcggattataatggggatgatggtaacgtaggtgagtatgaggcagacaagcaggctgagctggcttacaatgaggaagaagatggtgatggtggagaggaagacgtccaaggtgagcgtgggcctggcctccatgctataaccatgaaacccacctctaagttttttggttgaatttgtgtagaatttcccccacttattagtggcagtgtaacctaaattttttgttttttctttgtgacggaataatcgcttgaacccgggaggcggaggttgcaatgagccgaattcgtgccactgcactccagcctgggcaacagagcaagacttcgtct

SEQ ID NO: 7494 - protein, 433 aa, Homo sapiens [sequence omitted]

SEQ ID NO: 7495 - DNA, 3965 bp, Homo sapiens
ccgtgaggtgttgggtttgggggacgctggcagctgggttctcccggttcccttgggcaggtgcagggtcgggttcaaagcctccggaacgcgttttggcctgatttgaggaggggggcggggagggacctgcggcttgcggccccgcccccttctccggctcgcagccgaccggtaagcccgcctcctccctcggccggccctggggccgtgtccgccgggcaactccagccgaggcctgggcttctgcctgcaggtgtctgcggcgaggcccctagggtacagcccgatttggccccatggtgggtttcggggccaaccggcgggctggccgcctgccctctctcgtgctggtggtgctgctggtggtgatcgtcgtcctcgccttcaactactggagcatctcctcccgccacgtcctgcttcaggaggaggtggccgagctgcagggccaggtccagcgcaccgaagtggcccgcgggcggctggaaaagcgcaattcggacctcttgctgttggtggacacgcacaagaaacagatcgaccagaaggaggccgactacggccgcctcagcagccggctgcaggccagagagggcctcgggaagagatgcgaggatgacaaggttaaactacagaacaacatatcgtatcagatggcagacatacatcatttaaaggagcaacttgctgagcttcgtcaggaatttcttcgacaagaagaccagcttcaggactataggaagaacaatacttaccttgtgaagaggttagaatatgaaagttttcagtgtggacagcagatgaaggaattgagagcacagcatgaagaaaatattaaaaagttagcagaccagtttttagaggaacaaaagcaagagacccaaaagattcaatcaaatgatggaaaggaattggatataaacaatcaagtagtacctaaaaatattccaaaagtagctgagaatgttgcagataagaatgaagaaccctcaagcaatcatattccacatgggaaagaacaaatcaaaagaggtggtgatgcagggatgcctggaatagaagagaatgacctagcaaaagttgatgatcttccccctgctttaaggaagcctcctatttcagtttctcaacatgaaagtcatcaagcaatctcccatcttccaactggacaacctctctccccaaatatgcctccagattcacacataaaccacaatggaaaccccggtacttcaaaacagaatccttccagtcctcttcagcgtttaattccaggctcaaacttggacagtgaacccagaattcaaacagatatactaaagcaggctaccaaggacagagtcagtgatttccataaattgaagcaaagccgattctttgatgaaaatgaatcccctgttgatccgcagcatggctctaaactggcggattataatggggatgatggtaacgtaggtgagtatgaggcagacaagcaggctgagctggcttacaatgaggaagaagatggtgatggtggagaggaagacgtccaagatgatgaagaacgagagcttcaaatggatcctgcagactatggaaagcaacatttcaatgatgtcctttaagtcctaaaggaatgcttcagaaaacctaaagtgctgtaaaatgaaatcattctactttgtcctttctgacttttgttgtaaagacgaattgtatcagttgtaaagatacattgagatagaattaaggaaaaactttaatgaaggaatgtacccatgtacatatgtgaactttttcatattgtattatcaaggtatagacttttttggttatgatacagttaagccaaaaacagctaatctttgcatctaaagcaaactaatgtatatttcacattttattgagccgacttatttccacaaatagataaacaggacaaaatagttgtacaggttatatgtggcatagcataaccacagtaagaacagaacagatattcagcagaaaactttttatactctaattctttttttttttttttttgagacagagttttagtcttgtttcccaggctggagtgcaatggcacaatcttggctcactgcaacctccgcctcctgggttcaggcaattttcctgcctcagcctcccaagtagctgggattacaggcacccaccaccatgcccagctaatttttgtatttttaatagagagctaataattgtatatttaataaagacgggtttcaccatgttggccaggctggtcttgaactcctgacctcaggtgatcctcctgcattggcctcccaaagtgctggaattccaggcatgagccactgcgcccagtctacacactaattcttgttagcccaacagctgttctgttctatctacccctcatttcacgctcaaggagtcatacctagaatagttacacacaagagggaaactggaagccaaacactgtacagtattgtgtagaaagtcacctccctactccttttattttacatgagtgctgatgtgttttggcagatgagctttcagctgaggcctgatggaaattgagataacctgcaaagacataacagtatttatgagttatatcttagttcttgaaattgtggaatgcatgattgacaatatatttttaatttttattttttcaagtaataccagtactgtttaactatagccagaactggctaaaatttttatattttcagagttgaagttggtgaagacattcatgatttaaacaccagatcctgaaaggggttaaatctactttgaaatgaatctgcaatcagtatttcaaagcttttctggtaattttagtgatcttatttgattagactttttcagaagtactaaataaggaattttaacaggtttttattaatgcacagataaatagaagtacagtgaggtctatagccattttattaaaatagcttaaaagtttgtaaaaaaatgaatctttgtaattacttaatatgttagttaagaacccgtcaagcttatatttgctagacttacaaattattttaaatgcatttatcttttttgacactattcagtggaatgtgtaagctagctaattcttgttttctgatttaaagcacttttaaatcttatcctgccccctaaaaacaaaaggttttgatcacaaggggaaatttaagattgttaaccctgtttttcagaagggctactgttaattgcacataaacatgaaatgtgttttcccctgtgtactaacacattctaggcaaaattcaaacttatagtggtaaagaaacaggttgttcacttgctgaggtgcaaaaattcttaagacttctgtttgaaattgctcaatgactaggaaaagatgtagtagtttactaaaattgtttttctaccatatcaaattaaacaattcatgcctttatagggtcaggcctacaatgaataggtatggtggtttcacagaattttaaaatagagttaaagggaagtgatgtacatttcgggggcattagggtagggagatgaatcaaaaaatacccctagtaatgctttatattttaatactgcaaaagctttacaaatggaaaccatgcaattacctgccttagttcttttgtcataaaaacaatcacttggttggttgtattgtagctattacttatacagcaacatttcttcaattagcagtctagacattttataaacagaaatcttggaccaattgataatatttctgactgtattaatattttagtgctataaaatactatgtgaatctcttaaaaatctgacattttacagtctgtattagacatactgtttttataatgttttacttctgccttaagatttaggttttttaaatgtatttttgccctgaattaagtgttaatttgatggaaactctgcttttaaaatcatcatttactgggttctaataaattaaaaattaaacttgtttc

SEQ ID NO: 7496 - protein, 436 aa, Homo sapiens [sequence omitted]

SEQ ID NO: 7497 - DNA, 3797 bp, Homo sapiens
ccgtgaggtgttgggtttgggggacgctggcagctgggttctcccggttcccttgggcaggtgcagggtcgggttcaaagcctccggaacgcgttttggcctgatttgaggaggggggcggggagggacctgcggcttgcggccccgcccccttctccggctcgcagccgaccggtaagcccgcctcctccctcggccggccctggggccgtgtccgccgggcaactccagccgaggcctgggcttctgcctgcaggtgtctgcggcgaggcccctagggtacagcccgatttggccccatggtgggtttcggggccaaccggcgggctggccgcctgccctctctcgtgctggtggtgctgctggtggtgatcgtcgtcctcgccttcaactactggagcatctcctcccgccacgtcctgcttcaggaggaggtggccgagctgcagggccaggtccagcgcaccgaagtggcccgcgggcggctggaaaagcgcaattcggacctcttgctgttggtggacacgcacaagaaacagatcgaccagaaggaggccgactacggccgcctcagcagccggctgcaggccagagagggcctcgggaagagatgcgaggatgacaaggttaaactacagaacaacatatcgtatcagatggcagacatacatcatttaaaggagcaacttgctgagcttcgtcaggaatttcttcgacaagaagaccagcttcaggactataggaagaacaatacttaccttgtgaagaggttagaatatgaaagttttcagtgtggacagcagatgaaggaattgagagcacagcatgaagaaaatattaaaaagttagcagaccagtttttagaggaacaaaagcaagagacccaaaagattcaatcaaatgatggaaaggaattggatataaacaatcaagtagtacctaaaaatattccaaaagtagctgagaatgttgcagataagaatgaagaaccctcaagcaatcatattccacatgggaaagaacaaatcaaaagaggtggtgatgcagggatgcctggaatagaagagaatgacctagcaaaagttgatgatcttccccctgctttaaggaagcctcctatttcagtttctcaacatgaaagtcatcaagcaatctcccatcttccaactggacaacctctctccccaaatatgcctccagattcacacataaaccacaatggaaaccccggtacttcaaaacagaatccttccagtcctcttcagcgtttaattccaggctcaaacttggacagtgaacccagaattcaaacagatatactaaagcaggctaccaaggacagagtcagtgatttccataaattgaagcaaaatgatgaagaacgagagcttcaaatggatcctgcagactatggaaagcaacatttcaatgatgtcctttaagtcctaaaggaatgcttcagaaaacctaaagtgctgtaaaatgaaatcattctactttgtcctttctgacttttgttgtaaagacgaattgtatcagttgtaaagatacattgagatagaattaaggaaaaactttaatgaaggaatgtacccatgtacatatgtgaactttttcatattgtattatcaaggtatagacttttttggttatgatacagttaagccaaaaacagctaatctttgcatctaaagcaaactaatgtatatttcacattttattgagccgacttatttccacaaatagataaacaggacaaaatagttgtacaggttatatgtggcatagcataaccacagtaagaacagaacagatattcagcagaaaactttttatactctaattctttttttttttttttttgagacagagttttagtcttgtttcccaggctggagtgcaatggcacaatcttggctcactgcaacctccgcctcctgggttcaggcaattttcctgcctcagcctcccaagtagctgggattacaggcacccaccaccatgcccagctaatttttgtatttttaatagagagctaataattgtatatttaataaagacgggtttcaccatgttggccaggctggtcttgaactcctgacctcaggtgatcctcctgcattggcctcccaaagtgctggaattccaggcatgagccactgcgcccagtctacacactaattcttgttagcccaacagctgttctgttctatctacccctcatttcacgctcaaggagtcatacctagaatagttacacacaagagggaaactggaagccaaacactgtacagtattgtgtagaaagtcacctccctactccttttattttacatgagtgctgatgtgttttggcagatgagctttcagctgaggcctgatggaaattgagataacctgcaaagacataacagtatttatgagttatatcttagttcttgaaattgtggaatgcatgattgacaatatatttttaatttttattttttcaagtaataccagtactgtttaactatagccagaactggctaaaatttttatattttcagagttgaagttggtgaagacattcatgatttaaacaccagatcctgaaaggggttaaatctactttgaaatgaatctgcaatcagtatttcaaagcttttctggtaattttagtgatcttatttgattagactttttcagaagtactaaataaggaattttaacaggtttttattaatgcacagataaatagaagtacagtgaggtctatagccattttattaaaatagcttaaaagtttgtaaaaaaatgaatctttgtaattacttaatatgttagttaagaacccgtcaagcttatatttgctagacttacaaattattttaaatgcatttatcttttttgacactattcagtggaatgtgtaagctagctaattcttgttttctgatttaaagcacttttaaatcttatcctgccccctaaaaacaaaaggttttgatcacaaggggaaatttaagattgttaaccctgtttttcagaagggctactgttaattgcacataaacatgaaatgtgttttcccctgtgtactaacacattctaggcaaaattcaaacttatagtggtaaagaaacaggttgttcacttgctgaggtgcaaaaattcttaagacttctgtttgaaattgctcaatgactaggaaaagatgtagtagtttactaaaattgtttttctaccatatcaaattaaacaattcatgcctttatagggtcaggcctacaatgaataggtatggtggtttcacagaattttaaaatagagttaaagggaagtgatgtacatttcgggggcattagggtagggagatgaatcaaaaaatacccctagtaatgctttatattttaatactgcaaaagctttacaaatggaaaccatgcaattacctgccttagttcttttgtcataaaaacaatcacttggttggttgtattgtagctattacttatacagcaacatttcttcaattagcagtctagacattttataaacagaaatcttggaccaattgataatatttctgactgtattaatattttagtgctataaaatactatgtgaatctcttaaaaatctgacattttacagtctgtattagacatactgtttttataatgttttacttctgccttaagatttaggttttttaaatgtatttttgccctgaattaagtgttaatttgatggaaactctgcttttaaaatcatcatttactgggttctaataaattaaaaattaaacttgtttc

SEQ ID NO: 7498 - protein, 380 aa, Homo sapiens; identical to SEQ ID NO: 1032

SEQ ID NO: 7499 - DNA, 1918 bp, Homo sapiens
gtgttgggtttgggggacgctggcagctgggttctcccggttcccttgggcaggtgcagggtcgggttcaaagcctccggaacgcgttttggcctgatttgaggaggggggcggggagggacctgcggcttgcggccccgcccccttctccggctcgcagccgaccggtaagcccgcctcctccctcggccggccctggggccgtgtccgccgggcaactccagccgaggcctgggcttctgcctgcaggtgtctgcggcgaggcccctagggtacagcccgatttggccccatggtgggtttcggggccaaccggcgggctggccgcctgccctctctcgtgctggtggtgctgctggtggtgatcgtcgtcctcgccttcaactactggagcatctcctcccgccacgtcctgcttcaggaggaggtggccgagctgcagggccaggtccagcgcaccgaagtggcccgcgggcggctggaaaagcgcaattcggacctcttgctgttggtggacacgcacaagaaacagatcgaccagaaggaggccgactacggccgcctcagcagccggctgcaggccagagagggcctcgggaagagatgcgaggatgacaagagtctggctctgtggcccaggctgaagtgcagtggtacgatctccgctcactgtaagctctgcctcccaggttcacgccattctcctgcctcagcctcccgaatagctgggactacaggagcctaccaccacgcctggctaattttctgtatttttagtagagatggggtttcacagtgttagccaggatggtctctatctcctgacctcgtgatccgcccaccttggcctcccaaagtactgggattacaggcgtgagccaccgtgttcagcccacatgatactaattctcaatgggcagaatgaaataaaaccatttattgatatagtgctttatgattgttcaaagtttattatatgcataagtcatttatttgggaaagttgaataccatgtggtatgtgatagggatagaaagatagtaagattcccgttctttgaagaagtgagggaggcacacatagaaaaataatccataatgcatgattaaatgctatagtaaagctgcttacaaaggggtttgagaatacagaggaataactgattaacttcctcaggaagtcaagagcgaaataattcactgaaaaggtgatctttagtaatttaacaaaatgagaaagggataaggacaggaggaacataaatgaggccaggaaagctggaaagtatgttgtaccttcacagaaggtcaagcagtagaataggagagtgtaatataaggtacatggtattgagaagtaggggaaattatgtctgagttaaagctatttggggccagaataatgatgattattgttattactattttattgtggtaaaacatctataacaaaatttactatttttaccattttaagtgtataatttagtggcattaagtacattcacaatgttgtgtaaccatgattactaccatctatttctagaactttttcacgatcccaaaccaaacaaaacctctacccattaagcagtaattcccattgcccttccctccagcctgtggtaacctctattctagtttctgtgtctatgaatttgtctattctagatacctcatataggaggattatacaatatttgtccttttttatctggcttatttcacctagcataatgttttcaagattcatttatgttgtagcatgtatcagaacttcattcctctttatggctgataatattttattatgtgtatataccatgttttgcttttcattcatctgttgatgaacacttgagttcttcccctctttcagttattgtgagtaatgcctctataaacggtggtgtacaagt

SEQ ID NO: 7500 - protein, 169 aa, Homo sapiens
MVGFGANRRAGRLPSLVLVVLLVVIVVLAFNYWSISSRHVLLQEEVAELQGQVQRTEVARGRLEKRNSDLLLLVDTHKKQIDQKEADYGRLSSRLQAREGLGKRCEDDKSLALWPRLKCSGTISAHCKLCLPGSRHSPASASRIAGTTGAYHHAWLIFCIFSRDGVSQC

SEQ ID NO: 7501 - DNA, 642 bp, Homo sapiens
cagatgtcattatcttatatgtagaagacccaagagaactgacaaaaacgctcctggaactactttaaggaagcctcctatttcagtttctcaacatgaaagtcatcaagcaatctcccatcttccaactggacaacctctctccccaaatatgcctccagattcacacataaaccacaatggaaaccccggtacttcaaaacagaatccttccagtcctcttcagcgtttaattccaggctcaaacttggacagtgaacccagaattcaaacagatatactaaagcaggctaccaaggacagagtcagtgatttccataaattgaagcaaagccgattctttgatgaaaatgaatcccctgttgatccgcagcatggctctaaactggcggattataatggggatgatggtaacgtaggtgagtatgaggcagacaagcaggctgagctggcttacaatgaggaagaagatggtgatggtggagaggaagacgtccaaggtgagcgtgggcctggcctccatgctataaccatgaaacccacctctaagttttttggttgaatttgtgtagaatttcccccacttattagtggcagtgtaacctaaattttttgttttttctttgtgacggaatttcgctt

SEQ ID NO: 7502 - protein, 136 aa, Homo sapiens
MPPDSHINHNGNPGTSKQNPSSPLQRLIPGSNLDSEPRIQTDILKQATKDRVSDFHKLKQSRFFDENESPVDPQHGSKLADYNGDDGNVGEYEADKQAELAYNEEEDGDGGEEDVQGERGPGLHAITMKPTSKFFG

SEQ ID NO: 7503 - DNA, 635 bp, Homo sapiens
caatatgagaagcaatttgatcaacaatcactccctactgtttggagtaaccaccctcatgactttccatatgggagctgacatttgaagtaaattcttatctctattcaaagcatctaaatacaaatggtatgtccctcctagctggcaaacatgtaggcctcgcctggattttcagtttcaactattttggaagatgtctgtttctttgaagtatccctaaactatattttgtgtcaccacatagcctacattctaaagtttaaattaaactaacccaaatacatcttccaaatatggtgaaatataccccaaaatgttctagccacttttgcatgatgtggtaatacaaaattaaatttacaaaaatatgcagctctttataaatatatcaatataagtatgatatattaagctataaaacaaaaatactaaagttaaagctgccaaaaaatttgtagtgaggtcaggaatggtggctcatgccaaaaatcagtcatatttatatgcactagcaagaagtctaaaaggaaaattaagaaaacagttcgatttacaatgacatcaaaacaataaaatgcttaggaataaatttaaccaaggcagcacaagacttgtgcactaaaagctacaaa

SEQ ID NO: 7504 - protein, 38 aa, Homo sapiens
ASPGFSVSTILEDVCFFEVSLNYILCHHIAYILKFKLN

SEQ ID NO: 7505 - DNA, 625 bp, Homo sapiens
ctggcggctagggtttagtaactgtgggcgcgctgggttatctcaatttccatcaggcctcagctgaaagctcatctgccaaaacacatcagcactcatgtaaaataaaaggagtagggaggtgactttctacacaatactgtacagtgtttggcttccagtttccctcttgtgtgtaactattctagcactttaggttttctgaagcattcctttaggacttaaaggacatcattgaaatgttgctttccatagtctgcaggatccatttgaagctctcgttcttcatcatctgtgccctatcctgccactatcatctagagaatgccagaatgagacaagaaatgttaaatggcaacactcagctcactttagagccatgctgcggatcaacaggggattcattttcatcaaagaatcggcctgtgaagtaggtagaggattaattcaagagtaaagagagaagaaaagaaggaatctatacggaaggcagaccagaaagtaaacaagtgaaagctggcaacttttggggtactggatataaaaggatacattttgtgaaggttatccaagacaaaagtatataagagggaagactctgaaaatatgtaatttttattaagaa

SEQ ID NO: 7506 - protein, 64 aa, Homo sapiens
MLLSIVCRIHLKLSFFIICALSCHYHLENARMRQEMLNGNTQLTLEPCCGSTGDSFSSKNRPVK

SEQ ID NO: 7507 - DNA, 853 bp, Homo sapiens
ctttaactgataattgcatgcttttctcgttgagcatttattcttataactgtgactagggtaataactctttaacttctggtattacaaggttgcttggtttacactttcaatattctctaatttttgtaagggctttttcatctcattggataattttgaggtttttattatagtggtttatctcaatctttgttgtcaatcatttcttatatcttaaaggtgataattgtcagaaaattttgatttaatatttgtatggatttcaatctattgtaagtagatttattttcagtgccttctctctccctttcttgtactcttctccttcttcctcccctggttcttactgccaccttctacttcaagtccccaagaccctcatgttgccctcccattcctttcacaagaaaataaattcaccgatactaaggaatataaggaaatgacaaaagatgatgtcctcagtgaagtagagaaggggctgttacatttttggatttccctatttgcaagttaatcttacgtgagctgagtgttgccatttaacatttcttgtctcattctggcattctctagatgatagtggcaggatagggcacctacaaaggggaccattgcactccagcctaggtagcagaacgagactctgtctcaaaaaaagaaagaaaaaaagaaaaaaacattagtctagaatcaagagatagtctgtgtattgcttttcaagtcacttaaactctctgggccacaatttcttcatctgtatgaagactgctgaattagaataaatgatctttctcagttttaaaattctgtggccacattcaagttggaatcattatatataacacaa

SEQ ID NO: 7508 - protein, 52 aa, Homo sapiens
AECCHLTFLVSFWHSLDDSGRIGHLQRGPLHSSLGSRTRLCLKKRKKKRKKH

SEQ ID NO: 7509 - DNA, 873 bp, Homo sapiens
gtaagccgagattgcaccattgcactccagcctaggtagcagaacgagactctgtctcaaaaaaagaaagaaaaaaagaaaaaaacattagtctagaatcaagagatagtctgtgtattgcttttcaagtcacttaaactctctgggccacaatttcttcatctgtatgaagactgctgaattagaataaatgatctttctcagttttaaaattctgtggccacattcaagttggaatcattatatataacacaagtattatgagaaaatatgtttcagatttcaggatgtctgaaacagatctattcccaaatccatgaaagaaagtagaaactttattgccactattgtgactctacagtgaaagataacaaaaaatgaagcacacacttaatgctcaatcaataggggctcttctctgctctctagtagtaggagtagtttcttaagttgtgaggtccctaggattagagattccagctgcaggataagattctggcttcacctaaatatactttggctttggtctccaaaattgtgtattatgaattgaggcggaggttgcagtgagccgagatctcgccattgcactaacaggctcggctacaacagcaagaccctctctctcaaaaaaaaaaaaaaaaaaaaaaaaaaaaaaaaaatgctgggcgctgtgcctcacgcctgtaataccagcactttgggaggccgagccaggtgtatcacgaggtcaggagttcgagaccagcctaaccaacatggtaaaaccccgtctctactaaaaaaaaaaaaaatacaaaaattatccgggcatggtggcgcacgcctgtaatcccagctactcaagaggctgaggcaggagaatcgcttgaa

SEQ ID NO: 7510 - protein, 56 aa, Homo sapiens
MLGAVPHACNTSTLGGRARCITRSGVRDQPNQHGKTPSLLKKKKIQKLSGHGGARL

SEQ ID NO: 7511 - DNA, 922 bp, Homo sapiens
ggaaaaaccgtccttcgggtccccgcctctccactcctaacgctttactccctactccccctgcgaccactacacagccggctacggaggcccctaatgtacaaatatcccccaggcccttgctcatcctgataggttttgtcctttcttaatcgacccagtactaaggccttgtgttcagtttttctccaggattcagactagagagtttcttccggcgtaaggaacttcaacgctcttcacggaagtaaaagtgtttttttggttgttgttgccgttgtggctgcccgcattccttccctcccacctcgcggaattgtggcgggagggggaggaggaagtcagggcgcctgcgcggagaggccgctttccatccgggtccctgtccgtgcggtgcagcaggtcggtaggcgggaaatggcgactggctgaaggagctggttctgttgctgctgcggggtaagcgggaaagacaccacacattgcgcagtcgggaccatcgccggagcctgaggacacttctctgtcgtcacagttagttttacatgtggcacccataaaagatgaggctgagaacacggaaagcttctcagcagtcaaatcaaatccaaacacaacgcactgccagagcaaagaggaaatattcagaggttgatgatagcctgccttcaggaggagaaaaaccatcgaagaatgaaaccggcttgttgtcttcaattaaaaaatttattaaaggaagcacacctaaggaagagagagaaaatccttcaaaacggagtagaattgaacgtgatatagataacaatttgatcacgtcaacaccaagagcaggagaaaaacctaacaaacagatatctcgagtaagacggaaaagtcaagtaaatggagaagctggtagttatgaaatgacaaatcaacatgt

SEQ ID NO: 7512 - protein, 118 aa, Homo sapiens
MRLRTRKASQQSNQIQTQRTARAKRKYSEVDDSLPSGGEKPSKNETGLLSSIKKFIKGSTPKEERENPSKRSRIERDIDNNLITSTPRAGEKPNKQISRVRRKSQVNGEAGSYEMTNQ

SEQ ID NO: 7513 - DNA, 3409 bp, Homo sapiens
ggaaaaaccgtccttcgggtccccgcctctccactcctaacgctttactccctactccccctgcgaccactacacagccggctacggaggcccctaatgtacaaatatcccccaggcccttgctcatcctgataggttttgtcctttcttaatcgacccagtactaaggccttgtgttcagtttttctccaggattcagactagagagtttcttccggcgtaaggaacttcaacgctcttcacggaagtaaaagtgtttttttggttgttgttgccgttgtggctgcccgcattccttccctcccacctcgcggaattgtggcgggagggggaggaggaagtcagggcgcctgcgcggagaggccgctttccatccgggtccctgtccgtgcggtgcagcaggtcggtaggcgggaaatggcgactggctgaaggagctggttctgttgctgctgcggggtaagcgggaaagacaccacacattgcgcagtcgggaccatcgccggagcctgaggacacttctctgtcgtcacagttagttttacatgtggcacccataaaagatgaggctgagaacacggaaagcttctcagcagtcaaatcaaatccaaacacaacgcactgccagagcaaagaggaaatattcagaggttgatgatagcctgccttcaggaggagaaaaaccatcgaagaatgaaaccggcttgttgtcttcaattaaaaaatttattaaaggaagcacacctaaggaagagagagaaaatccttcaaaacggagtagaattgaacgtgatatagataacaatttgatcacgtcaacaccaagagcaggagaaaaacctaacaaacagatatctcgagtaagacggaaaagtcaagtaaatggagaagctggtagttatgaaatgacaaatcaacatgtaaaacaaaatggaaaattagaagataatccttcctctggcagtcctccaaggactactttgttggggaccatattttcacctgtcttcaactttttttcaccagcaaataaaaatggaacgtcaggatcagattctccaggacaggctgtggaagctgaagaaatagtaaaacaacttgatatggaacaggtggatgagatcactaccagtactactacatcaactaatggagcagcttactcaaatcaagcagttcaagtgagaccatcactaaacaatggtttagaagaagcagaagaaacagttaatcgtgatatcccaccccttacagcaccagtaactccagatagtggttattcatcagcccacgcggaggccacctatgaagaagactgggaagtatttgacccctattatttcatcaaacatgtcccgccactgacagaagaacaactaaataggaaacctgctcttccgttgaaaacaagaagcacaccggaattctccctagttttagacttggatgaaacactagtgcattgtagtctaaatgagctagaagatgcagcacttacttttccagtccttttccaagatgtcatttatcaggtttatgtgagattaagaccatttttcagggaattcctggaacgaatgtctcagatgtatgagatcattctttttactgcttctaagaaggtgtatgcagacaagttactgaacatactagaccctaaaaagcaactggtcaggcaccggcttttccgtgaacattgtgtttgtgtacaaggaaactatataaaggacttaaatattcttggaagagatctttcaaaaactataataattgacaactcaccacaagcctttgcatatcagctttctaatggaatccctatagaaagttggtttatggataaaaatgacaatgaactcctaaaattgattccattcctggagaagcttgtagaactgaatgaagatgttcgaccacacatcagagacagatttcgcttgcatgatttgctgcccccagattaagtacaaagacttgtcaaatcactgaagggggagagaatgcaggacccttttggactaagacaaaaacattgccattactgttgaaattttgcatttttgtaccccgtcttgcttttcttatctttggtgcccaataataattaagggttacagaaagagactttatctatctcagatcgaatacatatagtaggtaggctaaaacagaagagtctttagaactagtgcaactccagtgaaattttttatgtacaggacatctgcagtttataaagaattctgtttctgccaccagcagtttgacctgtagtcacacaggattttatgataataacagagatgaaaatggacttttattttctctctgtttggtgctctaagtgggtttgtagccacttttctgttactttatgattctcatttcaacaggaatggccagtaaaagttgttttatttttcctgttaaggtttataacctttttacatttttgacctgtattagattagaatttcattatgcattccttttagttgaggcgcttcatagttttctggagatagtcaatttttagttttttattatacatttgaatggccgttttcctgctttgtctgcctgcacattgtatatttgtttaaaaatattctctacttttagtctatgtaagtttcatttagaaagacatgcatttatattttgtttctgtaatattctactgtaggtgaaatcttttcaaaaatcaagagactgggtagataagaatatatgaatgactaatatacaaaagatttaaaccattgtgatggcgtatattctcaaatggtaatatcttgcaatggcacacagatttaatggataaaggtatacctcagacttcactgtgctcacaaatctttgaggagaaagtttggtcacctgtttggcttgatttagttactgctgcctttggttttctccaggaatgaagtattcagcacagtgactcagtatttttagttattttgcatgggctggtagtacctctgttatgctctcagttacaatcaatttaaaactgtataacagtcttggtacctaacagtagctatgcataatcctgtggcacagtacactcccaagccaccaatgcagttaatatgctctcatagtggtttttctatgctatatgaaaatagtcttcaagccttggttctctaatgcagctaccacaagaggttgatatttttatagtggcgtgtaatctccttttcgggaggctttttatggaaggtagaatttgtaaaagttcgtatgctttgcctctcaactgcattaacatgccacaggctcagactgtttttgtgtaaaggatgtcaaagaacggcactttttctaaagagaagtttgatattttgtatgcttgttaagaaagtacagtattggaaattaaaggtggacaactgat

SEQ ID NO: 7514 - protein, 466 aa, Homo sapiens; identical to SEQ ID NO: 1034

SEQ ID NO: 7515 - DNA, 6828 bp, Homo sapiens
ggaaaaaccgtccttcgggtccccgcctctccactcctaacgctttactccctactccccctgcgaccactacacagccggctacggaggcccctaatgtacaaatatcccccaggcccttgctcatcctgataggttttgtcctttcttaatcgacccagtactaaggccttgtgttcagtttttctccaggattcagactagagagtttcttccggcgtaaggaacttcaacgctcttcacggaagtaaaagtgtttttttggttgttgttgccgttgtggctgcccgcattccttccctcccacctcgcggaattgtggcgggagggggaggaggaagtcagggcgcctgcgcggagaggccgctttccatccgggtccctgtccgtgcggtgcagcaggtcggtaggcgggaaatggcgactggctgaaggagctggttctgttgctgctgcggggtaagcgggaaagacaccacacattgcgcagtcgggaccatcgccggagcctgaggacacttctctgtcgtcacagttagttttacatgtggcacccataaaagatgaggctgagaacacggaaagcttctcagcagtcaaatcaaatccaaacacaacgcactgccagagcaaagaggaaatattcagaggttgatgatagcctgccttcaggaggagaaaaaccatcgaagaatgaaaccggcttgttgtcttcaattaaaaaatttattaaaggaagcacacctaaggaagagagagaaaatccttcaaaacggagtagaattgaacgtgatatagataacaatttgatcacgtcaacaccaagagcaggagaaaaacctaacaaacagatatctcgagtaagacggaaaagtcaagtaaatggagaagctggtagttatgaaatgacaaatcaacatgtaaaacaaaatggaaaattagaagataatccttcctctggcagtcctccaaggactactttgttggggaccatattttcacctgtcttcaactttttttcaccagcaaataaaaatggaacgtcaggatcagattctccaggacaggctgtggaagctgaagaaatagtaaaacaacttgatatggaacaggtggatgagatcactaccagtactactacatcaactaatggagcagcttactcaaatcaagcagttcaagtgagaccatcactaaacaatggtttagaagaagcagaagaaacagttaatcgtgatatcccaccccttacagcaccagtaactccagatagtggttattcatcagcccacgcggaggccacctatgaagaagactgggaagtatttgacccctattatttcatcaaacatgtcccgccactgacagaagaacaactaaataggaaacctgctcttccgttgaaaacaagaagcacaccggaattctccctagttttagacttggatgaaacactagtgcattgtagtctaaatgagctagaagatgcagcacttacttttccagtccttttccaagatgtcatttatcaggtttatgtgagattaagaccatttttcagggaattcctggaacgaatgtctcagatgtatgagatcattctttttactgcttctaagaaggtgtatgcagacaagttactgaacatactagaccctaaaaagcaactggtcaggcaccggcttttccgtgaacattgtgtttgtgtacaaggaaactatataaaggacttaaatattcttggaagagatctttcaaaaactataataattgacaactcaccacaagcctttgcatatcagctttctaatggaatccctatagaaagttggtttatggataaaaatgacaatgaactcctaaaattgattccattcctggagaagcttgtagaactgaatgaagatgttcgaccacacatcagagacagatttcgcttgcatgatttgctgcccccagattaagtacaaagacttgtcaaatcactgaagggggagagaatgcaggacccttttggactaagacaaaaacattgccattactgttgaaattttgcatttttgtaccccgtcttgcttttcttatctttggtgcccaataataattaagggttacagaaagagactttatctatctcagatcgaatacatatagtaggtaggctaaaacagaagagtctttagaactagtgcaactccagtgaaattttttatgtacaggacatctgcagtttataaagaattctgtttctgccaccagcagtttgacctgtagtcacacaggattttatgataataacagagatgaaaatggacttttattttctctctgtttggtgctctaagtgggtttgtagccacttttctgttactttatgattctcatttcaacaggaatggccagtaaaagttgttttatttttcctgttaaggtttataacctttttacatttttgacctgtattagattagaatttcattatgcattccttttagttgaggcgcttcatagttttctggagatagtcaatttttagttttttattatacatttgaatggccgttttcctgctttgtctgcctgcacattgtatatttgtttaaaaatattctctacttttagtctatgtaagtttcatttagaaagacatgcatttatattttgtttctgtaatattctactgtaggtgaaatcttttcaaaaatcaagagactgggtagataagaatatatgaatgactaatatacaaaagatttaaaccattgtgatggcgtatattctcaaatggtaatatcttgcaatggcacacagatttaatggataaaggtatacctcagacttcactgtgctcacaaatctttgaggagaaagtttggtcacctgtttggcttgatttagttactgctgcctttggttttctccaggaatgaagtattcagcacagtgactcagtatttttagttattttgcatgggctggtagtacctctgttatgctctcagttacaatcaatttaaaactgtataacagtcttggtacctaacagtagctatgcataatcctgtggcacagtacactcccaagccaccaatgcagttaatatgctctcatagtggtttttctatgctatatgaaaatagtcttcaagccttggttctctaatgcagctaccacaagaggttgatatttttatagtggcgtgtaatctccttttcgggaggctttttatggaaggtagaatttgtaaaagttcgtatgctttgcctctcaactgcattaacatgccacaggctcagactgtttttgtgtaaaggatgtcaaagaacggcactttttctaaagagaagtttgatattttgtatgcttgttaagaaagtacagtattggaaattaaaggtggacaactgataattgaggagtatgtcaattaattttttatgtatattacctgtttacttgtacaacttactgtacaaattacatgcagcttcattttcaaatgaatccttaaaataaggaaatctttttaggaaaacatttaatttttgtatttttgattttaaaggcatgagttatgtcaattttcagtgtattaatgaagattttaacttttcatcaggttgagtgttttcttactatattatctgttgtgtatgtagttagcatattgtgtcactgaactgtttaaaaatctagcatgtagagcaagcctgttttgtggaaaatccttattcattaaaaaaataatcatggcagattttctgcaaaaaaaaaacaaaagcatttgcaattcagaatactgatttttttaattttatttaaagaaaggtattttgcttgcaggaaaaaaatactacagattcattttaatgagaatctttgaaatgtatttatctttagggcatctgggcatctttatgctgtttgtcttctgtctttcttgaaataaaatgtacatacgttacctttacatatgctcttgctcaaaattgtgaacctagttacatttctccctgctcccttcctttttatgctcaaacagcgaaacccaaaacttaaaagatctgaactttcagcatgcattctgattgctgaaagatttcctgatttagtgcattctcaaaagggctttcccataatctaaagggaaatgtaagcacctatactcttgtgcctgtgggcacttcaataataaaaaccaactttttaaactaatcatcttttatcaatgataaagttgttttcagtcccacactaggagagttcctttaagtcagctgatcaagcataagatacttccgtaaagaaataaactaagaaaattttttatggcttgagaaaattccttgaggccaaattaatatatttttctttgttattttatttgagtcattttaaatttgttaatacaaaatttaagataatttacagagacaatttatccagcttccttctaccttaatacaatgttttgtcttcccattatcctctcttttctttatctgttggtagatgtaaaaaacttccatttagttaatcggaggtgtgtattttttaaattgaaatgtgcccagccccttcagctcacacaggaaacatgaactcttaaaaaactgactagtaaatgcaggagaggtggatacctgatgagacacagcgaaagtgacctgtatacacattacaactctggagtacatattaaagtcgtgctatttccagtggtaaatgtctgacttttaagacattcttttaaatatttgtatcattgttaggatgttttaatcagttgttttttaattccatgtaatatatgtagccctcatcagatttatatcaccatatttctccttgtgtcctaagagaattgatgacaattcgtaaccataaattgttttatattagctagtatgtatatttatttttacccaatggctttatctgtttcccaaaatttgtttgggatttgttgaaagcattgtgtaacttctataaacggctattttcttgtaactgtcagtgaaatgaatgtgtacattgttttcttgtatttctctgggttgttttttgtttttttttccaagggttaacatagaatgttttttttaaaaaattatctttggccaatgactttttcatctagatcttactttcattcaaccttctaaagaagttcgtttctcattgttttgttctgtcaacttgcctgaaaaacagagacttcatctcatcaatgaagaaagcatttcattattcctacagatctttcctgcgagcacagaattcttcataaggaccagatctcttccatgtctgtgtcaatcacataaagctaaaatgtaaaggacattgaagcctttatttaattgtactaatatgatggtgttatatactacatcattagctagttaaggttttctgacctgacttctctttgtcttcctaggtatttatttgttatcttttaatcttgtgtatctaaattaacttagttaatagttacccaccgaataactatgccaagcaactagtaaagaatgtttattttatttccccttataggggaagagtggactgggaacaaaaatgtatgggccaaaaggccttagggttgtcattcattgactttcttattcctctcatgagctataattgagtatagtatttttttagtgctgatgtcattacttctcatgtcttcccctgagttgaaagcctacgacaaacatgtataaaatacatttaagaattttcagaatatgaaccacaaaactcagtatcttatatttaaatgctacttaagttattattggaatccaagtctcactaactagggtacatttttataaaatgtttctctgtatcttgaattgaaattacttgcccagaggcaagagttctggggatataacatgatttgagatcttttttaaaaaagggtggggcggcgggggagagagcgacaagtttatactagtttatgcttttgatattagtattttaagatacatcagttgatcccgaaacctgaccattagaattactctgaggagcttttaaaatagattcctggagcctacccctggaaaattgtctcgctggatctcgagaggggcctgagagttctggctttttttttttgtttggttggttttgttttgttttgttttgttttttctttaaagctctcctggtgattctaatagccagtattgggtaatcaatgttttagctaaatgtgacactggtttgagagtaggcaacaaaattaaagttcaccagacatctctttgtggtagagtttttttttttttaaactgggaccagatttcacagagcttattcaagatacatggaggaataataaagaagattaaggctactgctcattatcatttttgtctttcatattttttaagggtttgcatttctaggacttggaatagttgaccatatacatagctaaaggacatgtccctgaatgagaccattatatatattatctgtaaaatatttcactatttttttattttataaatctttgtagaaataagcaatgaaatactactttcatcttttgaaatgggatttttcaaggcagtgtccttttggcattaaggtaggggggagttaatattctctctgccttgtttccacgtgaatcaatattaaagtcatggacattttaaaatctcaatttaatttcttcttatttactatgcagtatagccgtgaacaagtaatgtagatttagttttctcatcttcaaatgccctgatcaccctacctcacagggttgttgtggggataaataaaacttttatggaagca

SEQ ID NO: 7516 - protein, 466 aa, Homo sapiens; identical to SEQ ID NO: 1034

SEQ ID NO: 7517 - DNA, 1609 bp, Homo sapiens
gccgccgctgcttccaatctcagtcctcctcctcttccagggccgtctgccgggatctcctccccttctaaacctggtcctccagcggctctggcgccttgttttacatgtggcacccataaaagatgaggctgagaacacggaaagcttctcagcagtcaaatcaaatccaaacacaacgcactgccagagcaaagaggaaatattcagaggttgatgatagcctgccttcaggaggagaaaaaccatcgaagaatgaaaccggcttgttgtcttcaattaaaaaatttattaaaggaagcacacctaaggaagagagagaaaatccttcaaaacggagtagaattgaacgtgatatagataacaatttgatcacgtcaacaccaagagcaggagaaaaacctaacaaacagatatctcgagtaagacggaaaagtcaagtaaatggagaagctggtagttatgaaatgacaaatcaacatgtaaaacaaaatggaaaattagaagataatccttcctctggcagtcctccaaggactactttgttggggaccatattttcacctgtcttcaactttttttcaccagcaaataaaaatggaacgtcaggatcagattctccaggacaggctgtggaagctgaagaaatagtaaaacaacttgatatggaacaggtggatgagatcactaccagtactactacatcaactaatggagcagcttactcaaatcaagcagttcaagtgagaccatcactaaacaatggtttagaagaagcagaagaaacagttaatcgtgatatcccaccccttacagcaccagtaactccagatagtggttattcatcagcccacgcggaggccacctatgaagaagactgggaagtatttgacccctattatttcatcaaacatgtcccgccactgacagaagaacaactaaataggaaacctgctcttccgttgaaaacaagaagcacaccggaattctccctagttttagacttggatgaaacactagtgcattgtagtctaaatgagctagaagatgcagcacttacttttccagtccttttccaagatgtcatttatcaggtttatgtgagattaagaccatttttcagggaattcctggaacgaatgtctcagatgtatgagatcattctttttactgcttctaagaaggtgtatgcagacaagttactgaacatactagaccctaaaaagcaactggtcaggcaccggcttttccgtgaacattgtgtttgtgtacaaggaaactatataaaggacttaaatattcttggaagagatctttcaaaaactataataattgacaactcaccacaagcctttgcatatcagctttctaatggaatccctatagaaagttggtttatggataaaaatgacaatgaactcctaaaattgattccattcctggagaagcttgtagaactgaatgaagatgttcgaccacacatcagagacagatttcgcttgcatgatttgctgcccccagattaagtacaaagacttgtcaaatcactgaagggggagagaatgcaggacccttttggactaagacaaaaacattgccattactgttg

SEQ ID NO: 7518 - protein, 466 aa, Homo sapiens; identical to SEQ ID NO: 1034

SEQ ID NO: 7519 - DNA, 387 bp, Homo sapiens
gtgtgagccaccgcgcctggccaggagagttaagtttttatgcactggctgtgattagaaggggtgtagaatataggagcattgtctcggaaagatgacaggcatggtggggatagaattgtggtgggaagctttggctgcttggagtcctttgggatcctgacagtaaggaatagtgagactgagtgtggccccaagaagaattgtaagaccttaaagacaaatattttaatgaaggtcacaataggccagttgactgtactagggactatgtattttgtgatatccatatgttcctatattattattttattattattattattattattatttgagatgaatcttccagcctgggtaacagagcaagaccctgtctcaaagaaa

SEQ ID NO: 7520 - protein, 51 aa, Homo sapiens [sequence omitted]

SEQ ID NO: 7521 - DNA, 677 bp, Homo sapiens
atggaaaaagtttcaaagatgtttctttttgaaagttatggtcttgctgggattacaggcgtgacctaccacgcccagccaatgactacttttttaaaaatccagctatgttaactattaatagcctttcagtactatctatatacaatttttatcttaacacacaaaaaaatagaccatcaagtattattcatatcaagtagtagtagtgtagtgggttttttgaaattatatatatggctgggtgcggtggctcatgcctataatcccaggactttgggaggccaaggcaggcagatcacttgccttgctgacatgtcaaaaccccgtctctactaaaaatacaaaaattagccggttgtggtggcatgcgcctatagccccagctacttgggaggctgaggcaggagaatcgcttaaacctgggagacggaggttgcagtgagctgagaccacaccattgcactccagcctgggcaacagggcgagactccatttaaaaatatatatatatatattcattttctgtgtaaaatttaaattttggtaaaatcagttcacaacacctttttttttttgagacggagtctcactctgttgcccagactggagtgcagtagcgcatcttggctcactgcaacctctgtctcctgggttcaagcaattctccggtctca

SEQ ID NO: 7522 - protein, 37 aa, Homo sapiens
MEKVSKMFLFESYGLAGITGVTYHAQPMTTFLKIQLC

SEQ ID NO: 7523 - DNA, 6904 bp, Homo sapiens
attagaaatgacaaagtggtatattccttttggaaaatttttacttaaatgacatgcagcataaatgaagaaaaacctgagtaagaaaactataagataagcatcattgaatagcattcttatcagttattaaatcagtaattagtaatttaatcataaacatatttgagtactatagttagtttatgttcttctggtctggttatttggtttaatgttctgaaatattttcttagactattttgtcaatatatttgtaccctttgttaatatttctttgacgtataactacaaatgtagatgagtcatccttccttccttttgtttttttgtttttttttgtttttgttttttgagaagcagtttcactcttgttgcccaaactggagtggagtgcaatggcgtgatcttggctcactgcaacctccgcctcctgggttcaagcgattctcctgcctcaacctcccgagtagctgggattacaggtgtctgccaccacgcctggctaattttgtatttttagtagagacggggtttctccatgttggtcaggctggtctcgaactcccgacctcaggtgatcgcctgcctcagcctcccaaagtggtgggattacaggtgtgagccactgcgcctgcctgatgagtcatcctttcaaggtatattttagattatgaatatgtccatgtgatatgatttcttttttcttttttttgttttcctttttttttttttgagacggagttttgctcgtcgcccaggctggagtgcagtggcacgatctcagctcactgcagcctccacctcccgggttcgtgattctcctgcctccacctccttagtagctggcactacaggtgcgcgccactatgccgtgctaatttttttgtattattagtagagacggggttttgctgtgttggccaggctggtctcgaacttctgacctcaggtgatcccacctgtctcagcctcccaaagtgctgggattacagttgtgagctaccacacccagccccatgtgataggatttcttagatttgcttcacaataagccagtccagaatagggatgatgcaaagtggattggagtataaactagatttgtcctgtgtttcaaaatgtctataataaaaagaaaacaagtgaaaagctgtatatgatactaagttatatttaggtccttacttttatttgtttacatttaaaaatgtcttttaagaatttcatcttggttcctagttaaaattatatcaattatcctccatctcatatacaacatttagcctaaattttaaaacattttatcccagagattattcaccataaaataaatatggcttgcattcttgtttttaggctcctcttcaatgaaataccattaatttgttaagtttctactatatttcaagttatcatcctactcgatgggaatagaataatgaatgggagatatggtcactgtatttaaggggaaaaaaaagtataggcttttctatattctctttagattggcagtgtcccatcattcacagtgcctacctagcattgtactaattgtaactatttcttgaaggaataatggaatattttatttatattaatgatccttataaaatgtattttaatggaactttcttgtttagttttatatactctgagaagaaatgacactgaaaaaccaataggcttcaatttatttccttatcctctgtctcttgcactattgagttgtcaaagaaaagtctggtgacattacttttcaaaggaacttttagatcagtgtttacttaataaatctttgtttattttttaactttttccaaactaggtaaaatataagtaaaagaggatttaattacttatttattgttttagctttctaatggaatccctatagaaagttggtttatggataaaaatgacaatgaactcctaaaattgattccattcctggagaagcttgtagaactgaatgaagatgttcgaccacacatcagagacagatttcgcttgcatgatttgctgcccccagattaagtacaaagacttgtcaaatcactgaagggggagagaatgcaggacccttttggactaagacaaaaacattgccattactgttgaaattttgcatttttgtaccccgtcttgcttttcttatctttggtgcccaataataattaagggttacagaaagagactttatctatctcagatcgaatacatatagtaggtaggctaaaacagaagagtctttagaactagtgcaactccagtgaaattttttatgtacaggacatctgcagtttataaagaattctgtttctgccaccagcagtttgacctgtagtcacacaggattttatgataataacagagatgaaaatggacttttattttctctctgtttggtgctctaagtgggtttgtagccacttttctgttactttatgattctcatttcaacaggaatggccagtaaaagttgttttatttttcctgttaaggtttataacctttttacatttttgacctgtattagattagaatttcattatgcattccttttagttgaggcgcttcatagttttctggagatagtcaatttttagttttttattatacatttgaatggccgttttcctgctttgtctgcctgcacattgtatatttgtttaaaaatattctctacttttagtctatgtaagtttcatttagaaagacatgcatttatattttgtttctgtaatattctactgtaggtgaaatcttttcaaaaatcaagagactgggtagataagaatatatgaatgactaatatacaaaagatttaaaccattgtgatggcgtatattctcaaatggtaatatcttgcaatggcacacagatttaatggataaaggtatacctcagacttcactgtgctcacaaatctttgaggagaaagtttggtcacctgtttggcttgatttagttactgctgcctttggttttctccaggaatgaagtattcagcacagtgactcagtatttttagttattttgcatgggctggtagtacctctgttatgctctcagttacaatcaatttaaaactgtataacagtcttggtacctaacagtagctatgcataatcctgtggcacagtacactcccaagccaccaatgcagttaatatgctctcatagtggtttttctatgctatatgaaaatagtcttcaagccttggttctctaatgcagctaccacaagaggttgatatttttatagtggcgtgtaatctccttttcgggaggctttttatggaaggtagaatttgtaaaagttcgtatgctttgcctctcaactgcattaacatgccacaggctcagactgtttttgtgtaaaggatgtcaaagaacggcactttttctaaagagaagtttgatattttgtatgcttgttaagaaagtacagtattggaaattaaaggtggacaactgataattgaggagtatgtcaattaattttttatgtatattacctgtttacttgtacaacttactgtacaaattacatgcagcttcattttcaaatgaatccttaaaataaggaaatctttttaggaaaacatttaatttttgtatttttgattttaaaggcatgagttatgtcaattttcagtgtattaatgaagattttaacttttcatcaggttgagtgttttcttactatattatctgttgtgtatgtagttagcatattgtgtcactgaactgtttaaaaatctagcatgtagagcaagcctgttttgtggaaaatccttattcattaaaaaaataatcatggcagattttctgcaaaaaaaaaacaaaagcatttgcaattcagaatactgatttttttaattttatttaaagaaaggtattttgcttgcaggaaaaaaatactacagattcattttaatgagaatctttgaaatgtatttatctttagggcatctgggcatctttatgctgtttgtcttctgtctttcttgaaataaaatgtacatacgttacctttacatatgctcttgctcaaaattgtgaacctagttacatttctccctgctcccttcctttttatgctcaaacagcgaaacccaaaacttaaaagatctgaactttcagcatgcattctgattgctgaaagatttcctgatttagtgcattctcaaaagggctttcccataatctaaagggaaatgtaagcacctatactcttgtgcctgtgggcacttcaataataaaaaccaactttttaaactaatcatcttttatcaatgataaagttgttttcagtcccacactaggagagttcctttaagtcagctgatcaagcataagatacttccgtaaagaaataaactaagaaaattttttatggcttgagaaaattccttgaggccaaattaatatatttttctttgttattttatttgagtcattttaaatttgttaatacaaaatttaagataatttacagagacaatttatccagcttccttctaccttaatacaatgttttgtcttcccattatcctctcttttctttatctgttggtagatgtaaaaaacttccatttagttaatcggaggtgtgtattttttaaattgaaatgtgcccagccccttcagctcacacaggaaacatgaactcttaaaaaactgactagtaaatgcaggagaggtggatacctgatgagacacagcgaaagtgacctgtatacacattacaactctggagtacatattaaagtcgtgctatttccagtggtaaatgtctgacttttaagacattcttttaaatatttgtatcattgttaggatgttttaatcagttgttttttaattccatgtaatatatgtagccctcatcagatttatatcaccatatttctccttgtgtcctaagagaattgatgacaattcgtaaccataaattgttttatattagctagtatgtatatttatttttacccaatggctttatctgtttcccaaaatttgtttgggatttgttgaaagcattgtgtaacttctataaacggctattttcttgtaactgtcagtgaaatgaatgtgtacattgttttcttgtatttctctgggttgttttttgtttttttttccaagggttaacatagaatgttttttttaaaaaattatctttggccaatgactttttcatctagatcttactttcattcaaccttctaaagaagttcgtttctcattgttttgttctgtcaacttgcctgaaaaacagagacttcatctcatcaatgaagaaagcatttcattattcctacagatctttcctgcgagcacagaattcttcataaggaccagatctcttccatgtctgtgtcaatcacataaagctaaaatgtaaaggacattgaagcctttatttaattgtactaatatgatggtgttatatactacatcattagctagttaaggttttctgacctgacttctctttgtcttcctaggtatttatttgttatcttttaatcttgtgtatctaaattaacttagttaatagttacccaccgaataactatgccaagcaactagtaaagaatgtttattttatttccccttataggggaagagtggactgggaacaaaaatgtatgggccaaaaggccttagggttgtcattcattgactttcttattcctctcatgagctataattgagtatagtatttttttagtgctgatgtcattacttctcatgtcttcccctgagttgaaagcctacgacaaacatgtataaaatacatttaagaattttcagaatatgaaccacaaaactcagtatcttatatttaaatgctacttaagttattattggaatccaagtctcactaactagggtacatttttataaaatgtttctctgtatcttgaattgaaattacttgcccagaggcaagagttctggggatataacatgatttgagatcttttttaaaaaagggtggggcggcgggggagagagcgacaagtttatactagtttatgcttttgatattagtattttaagatacatcagttgatcccgaaacctgaccattagaattactctgaggagcttttaaaatagattcctggagcctacccctggaaaattgtctcgctggatctcgagaggggcctgagagttctggctttttttttttgtttggttggttttgttttgttttgttttgttttttctttaaagctctcctggtgattctaatagccagtattgggtaatcaatgttttagctaaatgtgacactggtttgagagtaggcaacaaaattaaagttcaccagacatctctttgtggtagagtttttttttttttaaactgggaccagatttcacagagcttattcaagatacatggaggaataataaagaagattaaggctactgctcattatcatttttgtctttcatattttttaagggtttgcatttctaggacttggaatagttgaccatatacatagctaaaggacatgtccctgaatgagaccattatatatattatctgtaaaatatttcactatttttttattttataaatctttgtagaaataagcaatgaaatactactttcatcttttgaaatgggatttttcaaggcagtgtccttttggcattaaggtaggggggagttaatattctctctgccttgtttccacgtgaatcaatattaaagtcatggacattttaaaatctcaatttaatttcttcttatttactatgcagtatagccgtgaacaagtaatgtagatttagttttctcatcttcaaatgccctgatcaccctacctcacagggttgttgtggggataaataaaacttttatggaagca

SEQ ID NO: 7524 - protein, 42 aa, Homo sapiens
MDKNDNELLKLIPFLEKLVELNEDVRPHIRDRFRLHDLLPPD

SEQ ID NO: 7525 - DNA, 663 bp, Homo sapiens
gctctcttctgctcttctgccctgtgaggatgcagcaagaaaaccctcaccagatgccagtgccttgatcttggacttcccagcccccagagctgactagatcgctagctggccctttgatttaactcttcatctaccatagtcaggtgccacagcttgatgaacgagatagaatcgcacaatgggatcaaagggacagccagcccagtttatttccagaggaaaagcttaccaggacacaaaggaggaaaaaagactcggcttgaaaccaattcttccctgaagtacaaatgtaagagaaaagacatcaccaggagcagttacgtctatggcaatcgtagctctgtaagcctggcctgctcacgtggaagtaaattatttgatgagctggggaaatataagcagtttgtgtggattaaaaggaaatcctcacccaaactatatctttaaaaattatctagataattcaggtgaaagcaggctttctcccttgtgaattattaaagtaattgattacatccatctgctcctcgtcagagaattcaagggccaaatgctttttcggcgtctccttttctatccttccctttcatgtgacttactcttgtctgaatcaggagtttctgtgaataatcaccggccagctgtcaccggttctctttt

SEQ ID NO: 7526 - protein, 96 aa, Homo sapiens [sequence omitted]

SEQ ID NO: 7527 - DNA, 4505 bp, Homo sapiens
acgtcatcacgcagggccgagtcggcgcggccacatcctttaaatatggtcttttttgggcgcgcgcgacaatgtgaggagtggggtggagcgtgtgtggtgtgtggctgcggcctgggcaagagccgccgcggaccatgagctgagtaagttctggagggatcctgcctcttggagccttcgcagccaggcagctgtgaactgtgagctagagtgaagcagaaatctaggaagatgagctccaagatggtcataagtgaaccaggactgaattgggatatttcccccaaaaatggccttaagacatttttctctcgagaaaattataaagatcattccatggctccaagtttaaaagaactacgtgttttatccaacagagagagcagaggagttatgtggacttgttggttaaatacgcaaagattcctgcaaattccaaagctgttggaataaataaaaatgactacttgcagtacttggatatgaaaaaacatgtgaacgaagaagttactgagttcctaaagtttttgcagaattctgcaaagaaatgtgcgcaggattataatatgctttctgatgatgcccgtctcttcacagagaaaattttaagagcttgcattgaacaagtgaaaaagtattcagaattctatactctccacgaggtcaccagcttaatgggattcttcccattcagagtagagatgggattaaagttagaaaaaactcttctcgcattgggcagtgtaaaatatgtgaaaacagtatttccctcaatgcctataaagttgcagctgtcaaaggacgatatagctaccattgaaacgtcagaacaaacagctgaagctatgcattatgatattagtaaagatccaaatgcagagaagcttgtttccagatatcaccctcagatagctctaactagtcagtcattatttaccttattaaataatcatggaccaacgtacaaggaacagtgggaaattccagtgtgtattcaagtaatacctgttgcaggttcaaaaccagttaaagtaatatatattaattcaccacttccccaaaagaaaatgactatgagagagagaaatcaaatctttcatgaagttccattaaaatttatgatgtccaaaaacacatctgttccagtctctgcagtctttatggacaaacctgaagagtttatatctgaaatggacatgtcctgtgaagtcaacgagtgccgaaaaattgagagtcttgaaaacttgtatttggattttgatgatgatgtcacagaacttgaaacttttggagtaaccaccaccaaagtatcaaaatcaccaagtccagcaagtacttccacagtacctaacatgacagatgctcctacagcccccaaagcaggaactacaactgtggcaccaagtgcaccagacatttctgctaattctagaagtttatctcagattctgatggaacaattgcaaaaggagaaacagctggtcactggtatggatggtggccctgaggaatgcaaaaataaagatgatcagggatttgaatcatgtgaaaaggtatcaaattctgacaagcctttgatacaagatagtgacttgaaaacatctgatgccttacagttagaaaattctcaggaaattgaaacttctaataaaaatgatatgactatagatatattacatgctgatggtgaaagacctaatgttctagaaaacctagacaactcaaaggaaaagactgttggatcagaagcagcaaaaactgaagatacagttctctgcagcagtgatacagatgaggagtgtttaatcattgatacagaatgtaaaaataatagtgatggaaagacagctgttgtgggttctaacttaagttccagaccagctagtccaaattcttcctcaggacaggcttctgtaggaaaccagactaatactgcttgtagtcctgaagagtcatgtgttttaaaaaaacctatcaaacgagtatataaaaaatttgatccagttggagagattttaaaaatgcaggatgagctcttaaagccaatttccagaaaagtaccagaattgcccttaatgaatttagaaaattctaaacagccttctgtttctgagcaattgtctggtccttcagactcctctagttggccgaaatctggatggccttctgcatttcagaagccaaaaggacgattgccatatgaacttcaggactatgttgaagatacatcggaatacctagctcctcaggaaggaaattttgtttataagttatttagcctgcaagacctgttgttactcgtacgctgcagtgtccagaggatagagacaagaccacgttctaaaaaacggaagaaaatcagaagacaatttccagtttatgtactaccaaaagtagagtatcaagcttgttatggagttgaagctctgactgaaagtgaactttgtcgcttatggactgaaagtttattgcattccaacagctcattttatgttgggcatatcgatgcatttacttcaaaactttttctactggaagaaattacctcagaagaattaaaagaaaagctttcagcactcaagatttccaatttatttaacatcctccaacacattctaaagaaactaagtagcttgcaggagggttcctacttgttatctcatgcagcagaagattcttcactcctgatttataaggcctctgatggaaaagttactaggacagcatacaatttgtataaaacacattgcggccttcctggtgtaccttccagtctctcagttccctgggtcccattagatcccagcctgttattaccatatcatatccatcatggaagaataccttgtacttttccaccgaaatcactggataccacaacacaacaaaagattggtggaacgagaatgcctacacgcagccacaggaatccagtttccatggaaaccaaaagcagttgcttgcctgctcagcaagttgaaactgaaggagtggctccacataaaagaaaaataacttgaggactgtaccatggaaaactaaatttaaaaaaacagttataacagtgtttaatttagataagtttgagggaaaataatcagtaggcaagaggaacatttttcctgtagtagctagagtgccttgaaaaaatgtgttggctatgtgaaggaatatttcaactaaaatggaatggtatgcttttcacccttgaagtttgaggaggatcttgatatgttttaacattatcatggcagggaaatatataaagaagaaaaatatttttacattaaaccttttctaaaaattgtaaatagaaaaataatttggttttttatcaagaacaacacttatcgttatgtattgtgttagttatattgccagtctgttgcgactgactcaaaaagttaaatgttgccactgctgaagatgattatgagcatcgcaaactttgtttctgacccattttgacagtttttatatactcctttaaaatgatgaatgttacaggttaataaagttaatacctttaaaaacttggtgaaattccattacagaagccaaaaataaaaactccctgcctctgaaaagtcagattactgacttcttgtttggcaaccatcagtttgtttaataaaagaaaaaatttggtggtataacatgtttgatgacagatgcctctatctctagattcaagctgagtgttgaaatacactgctgaaagcaaagagataggtatgttttccagaaaaaaagtcagtgtcattgctccagatgacaaggttaatgtggtaaagcataagcttttttttttttttgagatggagtctcgctctgttgcccaggctggagtgcagtggcatgatctcagctcaccacaacatccacctcctggattaaagcgattctcctgcctcatcctcccgagtagctgggactacaggcacctaccaccaggcttggctaatttttttttgtatttttagtagagacagggtgttaccatgttggccgggctggtctcaaactcctgaccttgtgatccgcctgccttggcctcccaaagtgctgggattacaggggtaagccaccgtgcctggccagcataagctatttttatcctcatctatactgattgatttaaattttccgggcctgcagatgaatttggaaaagggcataatcaactgatgttgctgtagcaaatttggacttaagaaactacagacagggccgggcgtggtggctcacacctgtaattccagcacttcgcaaggccgaggcgggagaatcacttgagtccaggggttggagaccagtctgggcaacacagacctcatctctacaaataaaaaagttagccgggtgtggtggggtgtgcctgtagtcccagctactcaaaaggctgaggcagaagaattgcttgagcccaagaagtcaaggctacagtgagttgtgatcgcaccacagaactcagcttgagtatcagagtgtgaccctgtctc

SEQ ID NO: 7528 - protein, 845 aa, Homo sapiens; identical to SEQ ID NO: 1036

SEQ ID NO: 7529 - DNA, 3443 bp, Homo sapiens
gacgtcatcacgcagggccgagtcggcgcggccacatcctttaaatatggtcttttttgggcgcgcgcgacaatgtgaggagtggggtggagcgtgtgtggtgtgtggctgcggcctgggcaagagccgccgcggaccatgagctgagtaagttctggagggatcctgcctcttggagccttcgcagccaggcagctgtgaactgtgagctagagtgaagcagaaatctaggaagatgagctccaagatggtcataagtgaaccaggactgaattgggatatttcccccaaaaatggccttaagacatttttctctcgagaaaattataaagatcattccatggctccaagtttaaaagaactacgtgttttatccaacagacgtataggagaaaatttgaatgcctcagcaagttctgtagaaaatgagccggcagttagttcagcaactcaagcaaaggaaaaagttaaaaccacaattggaatggttcttcttccaaaaccaagagttccttatcctcgtttctctcgtttctcacagagagagcagaggagttatgtggacttgttggttaaatacgcaaagattcctgcaaattccaaagctgttggaataaataaaaatgactacttgcagtacttggatatgaaaaaacatgtgaacgaagaagttactgagttcctaaagtttttgcagaattctgcaaagaaatgtgcgcaggattataatatgctttctgatgatgcccgtctcttcacagagaaaattttaagagcttgcattgaacaagtgaaaaagtattcagaattctatactctccacgaggtcaccagcttaatgggattcttcccattcagagtagagatgggattaaagttagaaaaaactcttctcgcattgggcagtgtaaaatatgtgaaaacagtatttccctcaatgcctataaagttgcagctgtcaaaggacgatatagctaccattgaaacgtcagaacaaacagctgaagctatgcattatgatattagtaaagatccaaatgcagagaagcttgtttccagatatcaccctcagatagctctaactagtcagtcattatttaccttattaaataatcatggaccaacgtacaaggaacagtgggaaattccagtgtgtattcaagtaatacctgttgcaggttcaaaaccagttaaagtaatatatattaattcaccacttccccaaaagaaaatgactatgagagagagaaatcaaatctttcatgaagttccattaaaatttatgatgtccaaaaacacatctgttccagtctctgcagtctttatggacaaacctgaagagtttatatctgaaatggacatgtcctgtgaagtcaacgagtgccgaaaaattgagagtcttgaaaacttgtatttggattttgatgatgatgtcacagaacttgaaacttttggagtaaccaccaccaaagtatcaaaatcaccaagtccagcaagtacttccacagtacctaacatgacagatgctcctacagcccccaaagcaggaactacaactgtggcaccaagtgcaccagacatttctgctaattctagaagtttatctcagattctgatggaacaattgcaaaaggagaaacagctggtcactggtatggatggtggccctgaggaatgcaaaaataaagatgatcagggatttgaatcatgtgaaaaggtatcaaattctgacaagcctttgatacaagatagtgacttgaaaacatctgatgccttacagttagaaaattctcaggaaattgaaacttctaataaaaatgatatgactatagatatattacatgctgatggtgaaagacctaatgttctagaaaacctagacaactcaaaggaaaagactgttggatcagaagcagcaaaaactgaagatacagttctctgcagcagtgatacagatgaggagtgtttaatcattgatacagaatttaaaaaaacagttataacagtgtttaatttagataagtttgagggaaaataatcagtaggcaagaggaacatttttcctgtagtagctagagtgccttgaaaaaatgtgttggctatgtgaaggaatatttcaactaaaatggaatggtatgcttttcacccttgaagtttgaggaggatcttgatatgttttaacattatcatggcagggaaatatataaagaagaaaaatatttttacattaaaccttttctaaaaattgtaaatagaaaaataatttggttttttatcaagaacaacacttatcgttatgtattgtgttagttatattgccagtctgttgcgactgactcaaaaagttaaatgttgccactgctgaagatgattatgagcatcgcaaactttgtttctgacccattttgacagtttttatatactcctttaaaatgatgaatgttacaggttaataaagttaatacctttaaaaacttggtgaaattccattacagaagccaaaaataaaaactccctgcctctgaaaagtcagattactgacttcttgtttggcaaccatcagtttgtttaataaaagaaaaaatttggtggtataacatgtttgatgacagatgcctctatctctagattcaagctgagtgttgaaatacactgctgaaagcaaagagataggtatgttttccagaaaaaaagtcagtgtcattgctccagatgacaaggttaatgtggtaaagcataagcttttttttttttttgagatggagtctcgctctgttgcccaggctggagtgcagtggcatgatctcagctcaccacaacatccacctcctggattaaagcgattctcctgcctcatcctcccgagtagctgggactacaggcacctaccaccaggcttggctaatttttttttgtatttttagtagagacagggtgttaccatgttggccgggctggtctcaaactcctgaccttgtgatccgcctgccttggcctcccaaagtgctgggattacaggggtaagccaccgtgcctggccagcataagctatttttatcctcatctatactgattgatttaaattttccgggcctgcagatgaatttggaaaagggcataatcaactgatgttgctgtagcaaatttggacttaagaaactacagacagggccgggcgtggtggctcacacctgtaattccagcacttcgcaaggccgaggcgggagaatcacttgagtccaggggttggagaccagtctgggcaacacagacctcatctctacaaataaaaaagttagccgggtgtggtggggtgtgcctgtagtcccagctactcaaaaggctgaggcagaagaattgcttgagcccaagaagtcaaggctacagtgagttgtgatcgcaccacagaactcagcttgagtatcagagtgtgaccctgtctc

SEQ ID NO: 7530 - protein, 600 aa, Homo sapiens
MSSKMVISEPGLNWDISPKNGLKTFFSRENYKDHSMAPSLKELRVLSNRRIGENLNASASSVENEPAVSSATQAKEKVKTTIGMVLLPKPRVPYPRFSRFSQREQRSYVDLLVKYAKIPANSKAVGINKNDYLQYLDMKKHVNEEVTEFLKFLQNSAKKCAQDYNMLSDDARLFTEKILRACIEQVKKYSEFYTLHEVTSLMGFFPFRVEMGLKLEKTLLALGSVKYVKTVFPSMPIKLQLSKDDIATIETSEQTAEAMHYDISKDPNAEKLVSRYHPQIALTSQSLFTLLNNHGPTYKEQWEIPVCIQVIPVAGSKPVKVIYINSPLPQKKMTMRERNQIFHEVPLKFMMSKNTSVPVSAVFMDKPEEFISEMDMSCEVNECRKIESLENLYLDFDDDVTELETFGVTTTKVSKSPSPASTSTVPNMTDAPTAPKAGTTTVAPSAPDISANSRSLSQILMEQLQKEKQLVTGMDGGPEECKNKDDQGFESCEKVSNSDKPLIQDSDLKTSDALQLENSQEIETSNKNDMTIDILHADGERPNVLENLDNSKEKTVGSEAAKTEDTVLCSSDTDEECLIIDTEFKKTVITVFNLDKFEGK

SEQ ID NO: 7531 - DNA, 4666 bp, Homo sapiens
gacgtcatcacgcagggccgagtcggcgcggccacatcctttaaatatggtcttttttgggcgcgcgcgacaatgtgaggagtggggtggagcgtgtgtggtgtgtggctgcggcctgggcaagagccgccgcggaccatgagctgagtaagttctggagggatcctgcctcttggagccttcgcagccaggcagctgtgaactgtgagctagagtgaagcagaaatctaggaagatgagctccaagatggtcataagtgaaccaggactgaattgggatatttcccccaaaaatggccttaagacatttttctctcgagaaaattataaagatcattccatggctccaagtttaaaagaactacgtgttttatccaacagacgtataggagaaaatttgaatgcctcagcaagttctgtagaaaatgagccggcagttagttcagcaactcaagcaaaggaaaaagttaaaaccacaattggaatggttcttcttccaaaaccaagagttccttatcctcgtttctctcgtttctcacagagagagcagaggagttatgtggacttgttggttaaatacgcaaagattcctgcaaattccaaagctgttggaataaataaaaatgactacttgcagtacttggatatgaaaaaacatgtgaacgaagaagttactgagttcctaaagtttttgcagaattctgcaaagaaatgtgcgcaggattataatatgctttctgatgatgcccgtctcttcacagagaaaattttaagagcttgcattgaacaagtgaaaaagtattcagaattctatactctccacgaggtcaccagcttaatgggattcttcccattcagagtagagatgggattaaagttagaaaaaactcttctcgcattgggcagtgtaaaatatgtgaaaacagtatttccctcaatgcctataaagttgcagctgtcaaaggacgatatagctaccattgaaacgtcagaacaaacagctgaagctatgcattatgatattagtaaagatccaaatgcagagaagcttgtttccagatatcaccctcagatagctctaactagtcagtcattatttaccttattaaataatcatggaccaacgtacaaggaacagtgggaaattccagtgtgtattcaagtaatacctgttgcaggttcaaaaccagttaaagtaatatatattaattcaccacttccccaaaagaaaatgactatgagagagagaaatcaaatctttcatgaagttccattaaaatttatgatgtccaaaaacacatctgttccagtctctgcagtctttatggacaaacctgaagagtttatatctgaaatggacatgtcctgtgaagtcaacgagtgccgaaaaattgagagtcttgaaaacttgtatttggattttgatgatgatgtcacagaacttgaaacttttggagtaaccaccaccaaagtatcaaaatcaccaagtccagcaagtacttccacagtacctaacatgacagatgctcctacagcccccaaagcaggaactacaactgtggcaccaagtgcaccagacatttctgctaattctagaagtttatctcagattctgatggaacaattgcaaaaggagaaacagctggtcactggtatggatggtggccctgaggaatgcaaaaataaagatgatcagggatttgaatcatgtgaaaaggtatcaaattctgacaagcctttgatacaagatagtgacttgaaaacatctgatgccttacagttagaaaattctcaggaaattgaaacttctaataaaaatgatatgactatagatatattacatgctgatggtgaaagacctaatgttctagaaaacctagacaactcaaaggaaaagactgttggatcagaagcagcaaaaactgaagatacagttctctgcagcagtgatacagatgaggagtgtttaatcattgatacagaatgtaaaaataatagtgatggaaagacagctgttgtgggttctaacttaagttccagaccagctagtccaaattcttcctcaggacaggcttctgtaggaaaccagactaatactgcttgtagtcctgaagagtcatgtgttttaaaaaaacctatcaaacgagtatataaaaaatttgatccagttggagagattttaaaaatgcaggatgagctcttaaagccaatttccagaaaagtaccagaattgcccttaatgaatttagaaaattctaaacagccttctgtttctgagcaattgtctggtccttcagactcctctagttggccgaaatctggatggccttctgcatttcagaagccaaaaggacgattgccatatgaacttcaggactatgttgaagatacatcggaatacctagctcctcaggaaggaaattttgtttataagttatttagcctgcaagacctgttgttactcgtacgctgcagtgtccagaggatagagacaagaccacgttctaaaaaacggaagaaaatcagaagacaatttccagtttatgtactaccaaaagtagagtatcaagcttgttatggagttgaagctctgactgaaagtgaactttgtcgcttatggactgaaagtttattgcattccaacagctcattttatgttgggcatatcgatgcatttacttcaaaactttttctactggaagaaattacctcagaagaattaaaagaaaagctttcagcactcaagatttccaatttatttaacatcctccaacacattctaaagaaactaagtagcttgcaggagggttcctacttgttatctcatgcagcagaagattcttcactcctgatttataaggcctctgatggaaaagttactaggacagcatacaatttgtataaaacacattgcggccttcctggtgtaccttccagtctctcagttccctgggtcccattagatcccagcctgttattaccatatcatatccatcatggaagaataccttgtacttttccaccgaaatcactggataccacaacacaacaaaagattggtggaacgagaatgcctacacgcagccacaggaatccagtttccatggaaaccaaaagcagttgcttgcctgctcagcaagttgaaactgaaggagtggctccacataaaagaaaaataacttgaggactgtaccatggaaaactaaatttaaaaaaacagttataacagtgtttaatttagataagtttgagggaaaataatcagtaggcaagaggaacatttttcctgtagtagctagagtgccttgaaaaaatgtgttggctatgtgaaggaatatttcaactaaaatggaatggtatgcttttcacccttgaagtttgaggaggatcttgatatgttttaacattatcatggcagggaaatatataaagaagaaaaatatttttacattaaaccttttctaaaaattgtaaatagaaaaataatttggttttttatcaagaacaacacttatcgttatgtattgtgttagttatattgccagtctgttgcgactgactcaaaaagttaaatgttgccactgctgaagatgattatgagcatcgcaaactttgtttctgacccattttgacagtttttatatactcctttaaaatgatgaatgttacaggttaataaagttaatacctttaaaaacttggtgaaattccattacagaagccaaaaataaaaactccctgcctctgaaaagtcagattactgacttcttgtttggcaaccatcagtttgtttaataaaagaaaaaatttggtggtataacatgtttgatgacagatgcctctatctctagattcaagctgagtgttgaaatacactgctgaaagcaaagagataggtatgttttccagaaaaaaagtcagtgtcattgctccagatgacaaggttaatgtggtaaagcataagcttttttttttttttgagatggagtctcgctctgttgcccaggctggagtgcagtggcatgatctcagctcaccacaacatccacctcctggattaaagcgattctcctgcctcatcctcccgagtagctgggactacaggcacctaccaccaggcttggctaatttttttttgtatttttagtagagacagggtgttaccatgttggccgggctggtctcaaactcctgaccttgtgatccgcctgccttggcctcccaaagtgctgggattacaggggtaagccaccgtgcctggccagcataagctatttttatcctcatctatactgattgatttaaattttccgggcctgcagatgaatttggaaaagggcataatcaactgatgttgctgtagcaaatttggacttaagaaactacagacagggccgggcgtggtggctcacacctgtaattccagcacttcgcaaggccgaggcgggagaatcacttgagtccaggggttggagaccagtctgggcaacacagacctcatctctacaaataaaaaagttagccgggtgtggtggggtgtgcctgtagtcccagctactcaaaaggctgaggcagaagaattgcttgagcccaagaagtcaaggctacagtgagttgtgatcgcaccacagaactcagcttgagtatcagagtgtgaccctgtctc

SEQ ID NO: 7532 - protein, 982 aa, Homo sapiens; identical to SEQ ID NO: 1038

SEQ ID NO: 7533 - DNA, 3657 bp, Homo sapiens
acgtcatcacgcagggccgagtcggcgcggccacatcctttaaatatggtcttttttgggcgcgcgcgacaatgtgaggagtggggtggagcgtgtgtggtgtgtggctgcggcctgggcaagagccgccgcggaccatgagctgagtaagttctggagggatcctgcctcttggagccttcgcagccaggcagctgtgaactgtgagctagagtgaagcagaaatctaggaagatgagctccaagatggtcataagtgaaccaggactgaattgggatatttcccccaaaaatggccttaagacatttttctctcgagaaaattataaagatcattccatggctccaagtttaaaagaactacgtgttttatccaacagagagagcagaggagttatgtggacttgttggttaaatacgcaaagattcctgcaaattccaaagctgttggaataaataaaaatgactacttgcagtacttggatatgaaaaaacatgtgaacgaagaagttactgagttcctaaagtttttgcagaattctgcaaagaaatgtgcgcaggattataatatgctttctgatgatgcccgtctcttcacagagaaaattttaagagcttgcattgaacaagtgaaaaagtattcagaattctatactctccacgaggtcaccagcttaatgggattcttcccattcagagtagagatgggattaaagttagaaaaaactcttctcgcattgggcagtgtaaaatatgtgaaaacagtatttccctcaatgcctataaagttgcagctgtcaaaggacgatatagctaccattgaaacgtcagaacaaacagctgaagctatgcattatgatattagtaaagatccaaatgcagagaagcttgtttccagatatcaccctcagatagctctaactagtcagtcattatttaccttattaaataatcatggaccaacgtacaaggaacagtgggaaattccagtgtgtattcaagtaatacctgttgcaggttcaaaaccagttaaagtaatatatattaattcaccacttccccaaaagaaaatgactatgagagagagaaatcaaatctttcatgaagttccattaaaatttatgatgtccaaaaacacatctgttccagtctctgcagtctttatggacaaacctgaagagtttatatctgaaatggacatgtcctgtgaagtcaacgagtgccgaaaaattgagagtcttgaaaacttgtatttggattttgatgatgatgtcacagaacttgaaacttttggagtaaccaccaccaaagtatcaaaatcaccaagtccagcaagtacttccacagtacctaacatgacagatgctcctacagcccccaaagcaggaactacaactgtggcaccaagtgcaccagacatttctgctaattctagaagtttatctcagattctgatggaacaattgcaaaaggagaaacagctggtcactggtatggatggtggccctgaggaatgcaaaaataaagatgatcagggatttgaatcatgtgaaaaggtatcaaattctgacaagcctttgatacaagatagtgacttgaaaacatctgatgccttacagttagaaaattctcaggaaattgaaacttctaataaaaatgatatgactatagatatattacatgctgatggtgaaagacctaatgttctagaaaacctagacaactcaaaggaaaagactgttggatcagaagcagcaaaaactgaagatacagttctctgcagcagtgatacagatgaggagtgtttaatcattgatacagaatgtaaaaataatagtgatggaaagacagctgttgtgggttctaacttaagttccagaccagctagtccaaattcttcctcaggacaggcttctgtaggaaaccagactaatactgcttgtagtcctgaagagtcatgtgttttaaaaaaacctatcaaacgagtatataaaaaatttgatccagttggagagattttaaaaatgcaggatgagctcttaaagccaatttccagaaaagtaccagaattgcccttaatgaatttagaaaattctaaacagccttctgtttctgagcaattgtctggtccttcagactcctctagttggccgaaatctggatggccttctgcatttcagaagccaaaaggacgattgccatatgaacttcaggactatgttgaagatacatcggaatacctagctcctcaggaaggaaattttgtttataagttatttagcctgcaagacctgttgttactcgtacgctgcagtgtccagaggatagagacaagaccacgttctaaaaaacggaagaaaatcagaagacaatttccagtttatgtactaccaaaagtagagtatcaagcttgttatggagttgaagctctgactgaaagtgaactttgtcgcttatggactgaaagtttattgcattccaacagctcattttatgttgggcatatcgatgcatttacttcaaaactttttctactggaagaaattacctcagaagaattaaaagaaaagctttcagcactcaagatttccaatttatttaacatcctccaacacattctaaagaaactaagtagcttgcaggagggttcctacttgttatctcatgcagcagaagattcttcactcctgatttataaggcctctgatggaaaagttactaggacagcatacaatttgtataaaacacattgcggccttcctggtgtaccttccagtctctcagttccctgggtcccattagatcccagcctgttattaccatatcatatccatcatggaagaataccttgtacttttccaccgaaatcactggataccacaacacaacaaaagattggtggaacgagaatgcctacacgcagccacaggaatccagtttccatggaaaccaaaagcagttgcttgcctgctcagcaagttgaaactgaaggagtggctccacataaaagaaaaataacttgaggactgtaccatggaaaactaaatttaaaaaaacagttataacagtgtttaatttagataagtttgagggaaaataatcagtaggcaagaggaacatttttcctgtagtagctagagtgccttgaaaaaatgtgttggctatgtgaaggaatatttcaactaaaatggaatggtatgcttttcacccttgaagtttgaggaggatcttgatatgttttaacattatcatggcagggaaatatataaagaagaaaaatatttttacattaaaccttttctaaaaattgtaaatagaaaaataatttggttttttatcaagaacaacacttatcgttatgtattgtgttagttatattgccagtctgttgcgactgactcaaaaagttaaatgttgccactgctgaagatgattatgagcatcgcaaactttgtttctgacccattttgacagtttttatatactcctttaaaatgatgaatgttacaggttaataaagttaatacctttaaaaacttggtgaaattccattacagaagccaaaaataaaaactccctgcctctgaaaagtcagattactgacttcttgtttggcaaccatcagtttgtttaataaaagaaaaaatttggtggtat

SEQ ID NO: 7534 - protein, 845 aa, Homo sapiens; identical to SEQ ID NO: 1036

SEQ ID NO: 7535 - DNA, 2595 bp, Homo sapiens
gacgtcatcacgcagggccgagtcggcgcggccacatcctttaaatatggtcttttttgggcgcgcgcgacaatgtgaggagtggggtggagcgtgtgtggtgtgtggctgcggcctgggcaagagccgccgcggaccatgagctgagtaagttctggagggatcctgcctcttggagccttcgcagccaggcagctgtgaactgtgagctagagtgaagcagaaatctaggaagatgagctccaagatggtcataagtgaaccaggactgaattgggatatttcccccaaaaatggccttaagacatttttctctcgagaaaattataaagatcattccatggctccaagtttaaaagaactacgtgttttatccaacagacgtataggagaaaatttgaatgcctcagcaagttctgtagaaaatgagccggcagttagttcagcaactcaagcaaaggaaaaagttaaaaccacaattggaatggttcttcttccaaaaccaagagttccttatcctcgtttctctcgtttctcacagagagagcagaggagttatgtggacttgttggttaaatacgcaaagattcctgcaaattccaaagctgttggaataaataaaaatgactacttgcagtacttggatatgaaaaaacatgtgaacgaagaagttactgagttcctaaagtttttgcagaattctgcaaagaaatgtgcgcaggattataatatgctttctgatgatgcccgtctcttcacagagaaaattttaagagcttgcattgaacaagtgaaaaagtattcagaattctatactctccacgaggtcaccagcttaatgggattcttcccattcagagtagagatgggattaaagttagaaaaaactcttctcgcattgggcagtgtaaaatatgtgaaaacagtatttccctcaatgcctataaagttgcagctgtcaaaggacgatatagctaccattgaaacgtcagaacaaacagctgaagctatgcattatgatattagtaaagatccaaatgcagagaagcttgtttccagatatcaccctcagatagctctaactagtcagtcattatttaccttattaaataatcatggaccaacgtacaaggaacagtgggaaattccagtgtgtattcaagtaatacctgttgcaggttcaaaaccagttaaagtaatatatattaattcaccacttccccaaaagaaaatgactatgagagagagaaatcaaatctttcatgaagttccattaaaatttatgatgtccaaaaacacatctgttccagtctctgcagtctttatggacaaacctgaagagtttatatctgaaatggacatgtcctgtgaagtcaacgagtgccgaaaaattgagagtcttgaaaacttgtatttggattttgatgatgatgtcacagaacttgaaacttttggagtaaccaccaccaaagtatcaaaatcaccaagtccagcaagtacttccacagtacctaacatgacagatgctcctacagcccccaaagcaggaactacaactgtggcaccaagtgcaccagacatttctgctaattctagaagtttatctcagattctgatggaacaattgcaaaaggagaaacagctggtcactggtatggatggtggccctgaggaatgcaaaaataaagatgatcagggatttgaatcatgtgaaaaggtatcaaattctgacaagcctttgatacaagatagtgacttgaaaacatctgatgccttacagttagaaaattctcaggaaattgaaacttctaataaaaatgatatgactatagatatattacatgctgatggtgaaagacctaatgttctagaaaacctagacaactcaaaggaaaagactgttggatcagaagcagcaaaaactgaagatacagttctctgcagcagtgatacagatgaggagtgtttaatcattgatacagaatttaaaaaaacagttataacagtgtttaatttagataagtttgagggaaaataatcagtaggcaagaggaacatttttcctgtagtagctagagtgccttgaaaaaatgtgttggctatgtgaaggaatatttcaactaaaatggaatggtatgcttttcacccttgaagtttgaggaggatcttgatatgttttaacattatcatggcagggaaatatataaagaagaaaaatatttttacattaaaccttttctaaaaattgtaaatagaaaaataatttggttttttatcaagaacaacacttatcgttatgtattgtgttagttatattgccagtctgttgcgactgactcaaaaagttaaatgttgccactgctgaagatgattatgagcatcgcaaactttgtttctgacccattttgacagtttttatatactcctttaaaatgatgaatgttacaggttaataaagttaatacctttaaaaacttggtgaaattccattacagaagccaaaaataaaaactccctgcctctgaaaagtcagattactgacttcttgtttggcaaccatcagtttgtttaataaaagaaaaaatttggtggtat

SEQ ID NO: 7536 - protein, 600 aa, Homo sapiens; identical to SEQ ID NO: 7530

SEQ ID NO: 7537 - DNA, 3818 bp, Homo sapiens
gacgtcatcacgcagggccgagtcggcgcggccacatcctttaaatatggtcttttttgggcgcgcgcgacaatgtgaggagtggggtggagcgtgtgtggtgtgtggctgcggcctgggcaagagccgccgcggaccatgagctgagtaagttctggagggatcctgcctcttggagccttcgcagccaggcagctgtgaactgtgagctagagtgaagcagaaatctaggaagatgagctccaagatggtcataagtgaaccaggactgaattgggatatttcccccaaaaatggccttaagacatttttctctcgagaaaattataaagatcattccatggctccaagtttaaaagaactacgtgttttatccaacagacgtataggagaaaatttgaatgcctcagcaagttctgtagaaaatgagccggcagttagttcagcaactcaagcaaaggaaaaagttaaaaccacaattggaatggttcttcttccaaaaccaagagttccttatcctcgtttctctcgtttctcacagagagagcagaggagttatgtggacttgttggttaaatacgcaaagattcctgcaaattccaaagctgttggaataaataaaaatgactacttgcagtacttggatatgaaaaaacatgtgaacgaagaagttactgagttcctaaagtttttgcagaattctgcaaagaaatgtgcgcaggattataatatgctttctgatgatgcccgtctcttcacagagaaaattttaagagcttgcattgaacaagtgaaaaagtattcagaattctatactctccacgaggtcaccagcttaatgggattcttcccattcagagtagagatgggattaaagttagaaaaaactcttctcgcattgggcagtgtaaaatatgtgaaaacagtatttccctcaatgcctataaagttgcagctgtcaaaggacgatatagctaccattgaaacgtcagaacaaacagctgaagctatgcattatgatattagtaaagatccaaatgcagagaagcttgtttccagatatcaccctcagatagctctaactagtcagtcattatttaccttattaaataatcatggaccaacgtacaaggaacagtgggaaattccagtgtgtattcaagtaatacctgttgcaggttcaaaaccagttaaagtaatatatattaattcaccacttccccaaaagaaaatgactatgagagagagaaatcaaatctttcatgaagttccattaaaatttatgatgtccaaaaacacatctgttccagtctctgcagtctttatggacaaacctgaagagtttatatctgaaatggacatgtcctgtgaagtcaacgagtgccgaaaaattgagagtcttgaaaacttgtatttggattttgatgatgatgtcacagaacttgaaacttttggagtaaccaccaccaaagtatcaaaatcaccaagtccagcaagtacttccacagtacctaacatgacagatgctcctacagcccccaaagcaggaactacaactgtggcaccaagtgcaccagacatttctgctaattctagaagtttatctcagattctgatggaacaattgcaaaaggagaaacagctggtcactggtatggatggtggccctgaggaatgcaaaaataaagatgatcagggatttgaatcatgtgaaaaggtatcaaattctgacaagcctttgatacaagatagtgacttgaaaacatctgatgccttacagttagaaaattctcaggaaattgaaacttctaataaaaatgatatgactatagatatattacatgctgatggtgaaagacctaatgttctagaaaacctagacaactcaaaggaaaagactgttggatcagaagcagcaaaaactgaagatacagttctctgcagcagtgatacagatgaggagtgtttaatcattgatacagaatgtaaaaataatagtgatggaaagacagctgttgtgggttctaacttaagttccagaccagctagtccaaattcttcctcaggacaggcttctgtaggaaaccagactaatactgcttgtagtcctgaagagtcatgtgttttaaaaaaacctatcaaacgagtatataaaaaatttgatccagttggagagattttaaaaatgcaggatgagctcttaaagccaatttccagaaaagtaccagaattgcccttaatgaatttagaaaattctaaacagccttctgtttctgagcaattgtctggtccttcagactcctctagttggccgaaatctggatggccttctgcatttcagaagccaaaaggacgattgccatatgaacttcaggactatgttgaagatacatcggaatacctagctcctcaggaaggaaattttgtttataagttatttagcctgcaagacctgttgttactcgtacgctgcagtgtccagaggatagagacaagaccacgttctaaaaaacggaagaaaatcagaagacaatttccagtttatgtactaccaaaagtagagtatcaagcttgttatggagttgaagctctgactgaaagtgaactttgtcgcttatggactgaaagtttattgcattccaacagctcattttatgttgggcatatcgatgcatttacttcaaaactttttctactggaagaaattacctcagaagaattaaaagaaaagctttcagcactcaagatttccaatttatttaacatcctccaacacattctaaagaaactaagtagcttgcaggagggttcctacttgttatctcatgcagcagaagattcttcactcctgatttataaggcctctgatggaaaagttactaggacagcatacaatttgtataaaacacattgcggccttcctggtgtaccttccagtctctcagttccctgggtcccattagatcccagcctgttattaccatatcatatccatcatggaagaataccttgtacttttccaccgaaatcactggataccacaacacaacaaaagattggtggaacgagaatgcctacacgcagccacaggaatccagtttccatggaaaccaaaagcagttgcttgcctgctcagcaagttgaaactgaaggagtggctccacataaaagaaaaataacttgaggactgtaccatggaaaactaaatttaaaaaaacagttataacagtgtttaatttagataagtttgagggaaaataatcagtaggcaagaggaacatttttcctgtagtagctagagtgccttgaaaaaatgtgttggctatgtgaaggaatatttcaactaaaatggaatggtatgcttttcacccttgaagtttgaggaggatcttgatatgttttaacattatcatggcagggaaatatataaagaagaaaaatatttttacattaaaccttttctaaaaattgtaaatagaaaaataatttggttttttatcaagaacaacacttatcgttatgtattgtgttagttatattgccagtctgttgcgactgactcaaaaagttaaatgttgccactgctgaagatgattatgagcatcgcaaactttgtttctgacccattttgacagtttttatatactcctttaaaatgatgaatgttacaggttaataaagttaatacctttaaaaacttggtgaaattccattacagaagccaaaaataaaaactccctgcctctgaaaagtcagattactgacttcttgtttggcaaccatcagtttgtttaataaaagaaaaaatttggtggtat

SEQ ID NO: 7538 - protein, 982 aa, Homo sapiens; identical to SEQ ID NO: 1038

SEQ ID NO: 7539 - DNA, 3692 bp, Homo sapiens
gacgtcatcacgcagggccgagtcggcgcggccacatcctttaaatatggtcttttttgggcgcgcgcgacaatgtgaggagtggggtggagcgtgtgtggtgtgtggctgcggcctgggcaagagccgccgcggaccatgagctgagtaagttctggagggatcctgcctcttggagccttcgcagccaggcagctgtgaactgtgagctagagtgaagcagaaatctaggaagatgagctccaagatggtcataagtgaaccaggactgaattgggatatttcccccaaaaatggccttaagacatttttctctcgagaaaattataaagatcattccatggctccaagtttaaaagaactacgtgttttatccaacagacgtataggagaaaatttgaatgcctcagcaagttctgtagaaaatgagccggcagttagttcagcaactcaagcaaaggaaaaagttaaaaccacaattggaatggttcttcttccaaaaccaagagttccttatcctcgtttctctcgtttctcacagagagagcagaggagttatgtggacttgttggttaaatacgcaaagattcctgcaaattccaaagctgttggaataaataaaaatgactacttgcagtacttggatatgaaaaaacatgtgaacgaagaagttactgagttcctaaagtttttgcagaattctgcaaagaaatgtgcgcaggattataatatgctttctgatgatgcccgtctcttcacagagaaaattttaagagcttgcattgaacaagtgaaaaagtattcagaattctatactctccacgaggtcaccagcttaatgggattcttcccattcagagtagagatgggattaaagttagaaaaaactcttctcgcattgggcagtgtaaaatatgtgaaaacagtatttccctcaatgcctataaagttgcagctgtcaaaggacgatatagctaccattgaaacgtcagaacaaacagctgaagctatgcattatgatattagtaaagatccaaatgcagagaagcttgtttccagatatcaccctcagatagctctaactagtcagtcattatttaccttattaaataatcatggaccaacgtacaaggaacagtgggaaattccagtgtgtattcaagtaatacctgttgcaggttcaaaaccagttaaagtaatatatattaattcaccacttccccaaaagaaaatgactatgagagagagaaatcaaatctttcatgaagttccattaaaatttatgatgtccaaaaacacatctgttccagtctctgcagtctttatggacaaacctgaagagtttatatctgaaatggacatgtcctgtgaagtcaacgagtgccgaaaaattgagagtcttgaaaacttgtatttggattttgatgatgatgtcacagaacttgaaacttttggagtaaccaccaccaaagtatcaaaatcaccaagtccagcaagtacttccacagtacctaacatgacagatgctcctacagcccccaaagcaggaactacaactgtggcaccaagtgcaccagacatttctgctaattctagaagtttatctcagattctgatggaacaattgcaaaaggagaaacagctggtcactggtatggatggtggccctgaggaatgcaaaaataaagatgatcagggatttgaatcatgtgaaaaggtatcaaattctgacaagcctttgatacaagatagtgacttgaaaacatctgatgccttacagttagaaaattctcaggaaattgaaacttctaataaaaatgatatgactatagatatattacatgctgatggtgaaagacctaatgttctagaaaacctagacaactcaaaggaaaagactgttggatcagaagcagcaaaaactgaagatacagttctctgcagcagtgatacagatgaggagtgtttaatcattgatacagaatgtaaaaataatagtgatggaaagacagctgttgtgggttctaacttaagttccagaccagctagtccaaattcttcctcaggacaggcttctgtaggaaaccagactaatactgcttgtagtcctgaagagtcatgtgttttaaaaaaacctatcaaacgagtatataaaaaatttgatccagttggagagattttaaaaatgcaggatgagctcttaaagccaatttccagaaaagtaccagaattgcccttaatgaatttagaaaattctaaacagccttctgtttctgagcaattgtctggtccttcagactcctctagttggccgaaatctggatggccttctgcatttcagaagccaaaaggacgattgccatatgaacttcaggactatgttgaagatacatcggaatacctagctcctcaggaaggaaattttgtttataagttatttagcctgcaagacctgttgttactcgtacgctgcagtgtccagaggatagagacaagaccacgttctaaaaaacggaagaaaatcagaagacaatttccagtttatgtactaccaaaagtagagtatcaagcttgttatggagttgaagctctgactgaaagtgaactttgtcgcttatggactgaaagtttattgcattccaacagctcattttatgttgggcatatcgatgcatttacttcaaaactttttctactggaagaaattacctcagaagaattaaaagaaaagctttcagcactcaagatttccaatttatttaacatcctccaacacattctaaagaaactaagtagcttgcaggagggttcctacttgttatctcatgcagcagaagattcttcactcctgatttataaggcctctgatggaaaagttactaggacagcatacaatttgtataaaacacattgcggccttcctggtgtaccttccagtctctcagttccctgggtcccattagatcccagcctgttattaccatatcatatccatcatggaagaataccttgtacttttccaccgaaatcactggataccacaacacaacaaaagattggtggaacgagaatgcctacacgcagccacaggaatccagtttccatggaaaccaaaagcagttgcttgcctgctcagcaagttgaaactgaaggagtggctccacataaaagaaaaataacttgaggactgtaccatggaaaactaaatttaaaaaaacagttataacagtgtttaatttagataagtttgagggaaaataatcagtaggcaagaggaacatttttcctgtagtagctagagtgccttgaaaaaatgtgttggctatgtgaaggaatatttcaactaaaatggaatggtatgcttttcacccttgaagtttgaggaggatcttgatatgttttaacattatcatggcagggaaatatataaagaagaaaaatatttttacattaaaccttttctaaaaattgtaaatagaaaaataatttggttttttatcaagaacaacacttatcgttatgtattgtgttagttatattgccagtctgttgcgactgactcaaaaagttaaatgttgccactgctgaagatgattatgagcatcgcaaactttgtttctgacccattttgacagtttttatatactcctttaaaatgatgaatgttacaggttaataaagttaataccttt

SEQ ID NO: 7540 - protein, 982 aa, Homo sapiens; identical to SEQ ID NO: 1038

SEQ ID NO: 7541 - DNA, 3531 bp, Homo sapiens
acgtcatcacgcagggccgagtcggcgcggccacatcctttaaatatggtcttttttgggcgcgcgcgacaatgtgaggagtggggtggagcgtgtgtggtgtgtggctgcggcctgggcaagagccgccgcggaccatgagctgagtaagttctggagggatcctgcctcttggagccttcgcagccaggcagctgtgaactgtgagctagagtgaagcagaaatctaggaagatgagctccaagatggtcataagtgaaccaggactgaattgggatatttcccccaaaaatggccttaagacatttttctctcgagaaaattataaagatcattccatggctccaagtttaaaagaactacgtgttttatccaacagagagagcagaggagttatgtggacttgttggttaaatacgcaaagattcctgcaaattccaaagctgttggaataaataaaaatgactacttgcagtacttggatatgaaaaaacatgtgaacgaagaagttactgagttcctaaagtttttgcagaattctgcaaagaaatgtgcgcaggattataatatgctttctgatgatgcccgtctcttcacagagaaaattttaagagcttgcattgaacaagtgaaaaagtattcagaattctatactctccacgaggtcaccagcttaatgggattcttcccattcagagtagagatgggattaaagttagaaaaaactcttctcgcattgggcagtgtaaaatatgtgaaaacagtatttccctcaatgcctataaagttgcagctgtcaaaggacgatatagctaccattgaaacgtcagaacaaacagctgaagctatgcattatgatattagtaaagatccaaatgcagagaagcttgtttccagatatcaccctcagatagctctaactagtcagtcattatttaccttattaaataatcatggaccaacgtacaaggaacagtgggaaattccagtgtgtattcaagtaatacctgttgcaggttcaaaaccagttaaagtaatatatattaattcaccacttccccaaaagaaaatgactatgagagagagaaatcaaatctttcatgaagttccattaaaatttatgatgtccaaaaacacatctgttccagtctctgcagtctttatggacaaacctgaagagtttatatctgaaatggacatgtcctgtgaagtcaacgagtgccgaaaaattgagagtcttgaaaacttgtatttggattttgatgatgatgtcacagaacttgaaacttttggagtaaccaccaccaaagtatcaaaatcaccaagtccagcaagtacttccacagtacctaacatgacagatgctcctacagcccccaaagcaggaactacaactgtggcaccaagtgcaccagacatttctgctaattctagaagtttatctcagattctgatggaacaattgcaaaaggagaaacagctggtcactggtatggatggtggccctgaggaatgcaaaaataaagatgatcagggatttgaatcatgtgaaaaggtatcaaattctgacaagcctttgatacaagatagtgacttgaaaacatctgatgccttacagttagaaaattctcaggaaattgaaacttctaataaaaatgatatgactatagatatattacatgctgatggtgaaagacctaatgttctagaaaacctagacaactcaaaggaaaagactgttggatcagaagcagcaaaaactgaagatacagttctctgcagcagtgatacagatgaggagtgtttaatcattgatacagaatgtaaaaataatagtgatggaaagacagctgttgtgggttctaacttaagttccagaccagctagtccaaattcttcctcaggacaggcttctgtaggaaaccagactaatactgcttgtagtcctgaagagtcatgtgttttaaaaaaacctatcaaacgagtatataaaaaatttgatccagttggagagattttaaaaatgcaggatgagctcttaaagccaatttccagaaaagtaccagaattgcccttaatgaatttagaaaattctaaacagccttctgtttctgagcaattgtctggtccttcagactcctctagttggccgaaatctggatggccttctgcatttcagaagccaaaaggacgattgccatatgaacttcaggactatgttgaagatacatcggaatacctagctcctcaggaaggaaattttgtttataagttatttagcctgcaagacctgttgttactcgtacgctgcagtgtccagaggatagagacaagaccacgttctaaaaaacggaagaaaatcagaagacaatttccagtttatgtactaccaaaagtagagtatcaagcttgttatggagttgaagctctgactgaaagtgaactttgtcgcttatggactgaaagtttattgcattccaacagctcattttatgttgggcatatcgatgcatttacttcaaaactttttctactggaagaaattacctcagaagaattaaaagaaaagctttcagcactcaagatttccaatttatttaacatcctccaacacattctaaagaaactaagtagcttgcaggagggttcctacttgttatctcatgcagcagaagattcttcactcctgatttataaggcctctgatggaaaagttactaggacagcatacaatttgtataaaacacattgcggccttcctggtgtaccttccagtctctcagttccctgggtcccattagatcccagcctgttattaccatatcatatccatcatggaagaataccttgtacttttccaccgaaatcactggataccacaacacaacaaaagattggtggaacgagaatgcctacacgcagccacaggaatccagtttccatggaaaccaaaagcagttgcttgcctgctcagcaagttgaaactgaaggagtggctccacataaaagaaaaataacttgaggactgtaccatggaaaactaaatttaaaaaaacagttataacagtgtttaatttagataagtttgagggaaaataatcagtaggcaagaggaacatttttcctgtagtagctagagtgccttgaaaaaatgtgttggctatgtgaaggaatatttcaactaaaatggaatggtatgcttttcacccttgaagtttgaggaggatcttgatatgttttaacattatcatggcagggaaatatataaagaagaaaaatatttttacattaaaccttttctaaaaattgtaaatagaaaaataatttggttttttatcaagaacaacacttatcgttatgtattgtgttagttatattgccagtctgttgcgactgactcaaaaagttaaatgttgccactgctgaagatgattatgagcatcgcaaactttgtttctgacccattttgacagtttttatatactcctttaaaatgatgaatgttacaggttaataaagttaataccttt

SEQ ID NO: 7542 - protein, 845 aa, Homo sapiens; identical to SEQ ID NO: 1036

SEQ ID NO: 7543 - DNA, 3312 bp, Homo sapiens
gacgtcatcacgcagggccgagtcggcgcggccacatcctttaaatatggtcttttttgggcgcgcgcgacaatgtgaggagtggggtggagcgtgtgtggtgtgtggctgcggcctgggcaagagccgccgcggaccatgagctgagtaagttctggagggatcctgcctcttggagccttcgcagccaggcagctgtgaactgtgagctagagtgaagcagaaatctaggaagatgagctccaagatggtcataagtgaaccaggactgaattgggatatttcccccaaaaatggccttaagacatttttctctcgagaaaattataaagatcattccatggctccaagtttaaaagaactacgtgttttatccaacagagagagcagaggagttatgtggacttgttggttaaatacgcaaagattcctgcaaattccaaagctgttggaataaataaaaatgactacttgcagtacttggatatgaaaaaacatgtgaacgaagaagttactgagttcctaaagtttttgcagaattctgcaaagaaatgtgcgcaggattataatatgctttctgatgatgcccgtctcttcacagagaaaattttaagagcttgcattgaacaagtgaaaaagtattcagaattctatactctccacgaggtcaccagcttaatgggattcttcccattcagagtagagatgggattaaagttagaaaaaactcttctcgcattgggcagtgtaaaatatgtgaaaacagtatttccctcaatgcctataaagttgcagctgtcaaaggacgatatagctaccattgaaacgtcagaacaaacagctgaagctatgcattatgatattagtaaagatccaaatgcagagaagcttgtttccagatatcaccctcagatagctctaactagtcagtcattatttaccttattaaataatcatggaccaacgtacaaggaacagtgggaaattccagtgtgtattcaagtaatacctgttgcaggttcaaaaccagttaaagtaatatatattaattcaccacttccccaaaagaaaatgactatgagagagagaaatcaaatctttcatgaagttccattaaaatttatgatgtccaaaaacacatctgttccagtctctgcagtctttatggacaaacctgaagagtttatatctgaaatggacatgtcctgtgaagtcaacgagtgccgaaaaattgagagtcttgaaaacttgtatttggattttgatgatgatgtcacagaacttgaaacttttggagtaaccaccaccaaagtatcaaaatcaccaagtccagcaagtacttccacagtacctaacatgacagatgctcctacagcccccaaagcaggaactacaactgtggcaccaagtgcaccagacatttctgctaattctagaagtttatctcagattctgatggaacaattgcaaaaggagaaacagctggtcactggtatggatggtggccctgaggaatgcaaaaataaagatgatcagggatttgaatcatgtgaaaaggtatcaaattctgacaagcctttgatacaagatagtgacttgaaaacatctgatgccttacagttagaaaattctcaggaaattgaaacttctaataaaaatgatatgactatagatatattacatgctgatggtgaaagacctaatgttctagaaaacctagacaactcaaaggaaaagactgttggatcagaagcagcaaaaactgaagatacagttctctgcagcagtgatacagatgaggagtgtttaatcattgatacagaatgtaaaaataatagtgatggaaagacagctgttgtgggttctaacttaagttccagaccagctagtccaaattcttcctcaggacaggcttctgtaggaaaccagactaatactgcttgtagtcctgaagagtcatgtgttttaaaaaaacctatcaaacgagtatataaaaaatttgatccagttggagagattttaaaaatgcaggatgagctcttaaagccaatttccagaaaagtaccagaattgcccttaatgaatttagaaaattctaaacagccttctgtttctgagcaattgtctggtccttcagactcctctagttggccgaaatctggatggccttctgcatttcagaagccaaaaggacgattgccatatgaacttcaggactatgttgaagatacatcggaatacctagctcctcaggaaggaaattttgtttataagttatttagcctgcaagacctgttgttactcgtacgctgcagtgtccagaggatagagacaagaccacgttctaaaaaacggaagaaaatcagaagacaatttccagtttatgtactaccaaaagtagagtatcaagcttgttatggagttgaagctctgactgaaagtgaactttgtcgcttatggactgaaagtttattgcattccaacagctcattttatgttgggcatatcgatgcatttacttcaaaactttttctactggaagaaattacctcagaagaattaaaagaaaagctttcagcactcaagatttccaatttatttaacatcctccaacacattctaaagaaactaagtagcttgcaggagggttcctacttgttatctcatgcagcagaagattcttcactcctgatttataaggcctctgatggaaaagttactaggacagcatacaatttgtataaaacacattgcggccttcctggtgtaccttccagtctctcagttccctgggtcccattagatcccagcctgttattaccatatcatatccatcatggaagaataccttgtacttttccaccgaaatcactggataccacaacacaacaaaagattggtggaacgagaatgcctacacgcagccacaggaatccagtttccatggaaaccaaaagcagttgcttgcctgctcagcaagttgaaactgaaggagtggctccacataaaagaaaaataacttgaggactgtaccatggaaaactaaatttaaaaaaacagttataacagtgtttaatttagataagtttgagggaaaataatcagtaggcaagaggaacatttttcctgtagtagctagagtgccttgaaaaaatgtgttggctatgtgaaggaatatttcaactaaaatggaatggtatgcttttcacccttgaagtttgaggaggatcttgatatgttttaacattatcatggcagggaaatatataaagaagaaaaatatttttacattaaaccttttctaaaaattgt

SEQ ID NO: 7544 - protein, 845 aa, Homo sapiens; identical to SEQ ID NO: 1036

SEQ ID NO: 7545 - DNA, 1442 bp, Homo sapiens
aggggcgggaggagggaacatggcggccgggccaggaccctttgctcctggctctgcgcggctcctacccctgctttgcttgcccttttacctgcttttctggaaccttgtttcccctctctttgcgtcccctttccctcagccgtttcttttgccttcctcgactattcccccccagctccacactgggtcgaagtgtgagaggtagattaagtgggagccggtcgggcccgttcggtgtcgagagaccgactcctaaatttgattaggttctcgcaggtcactttatcagtctgcctggggtcacaggagaagtactgaacatgagagatcaagcctgatttgtagtcctgatgatgtctctgagtaagttctggagggatcctgcctcttggagccttcgcagccaggcagctgtgaactgtgagctagagtgaagcagaaatctaggaagatgagctccaagatggtcataagtgaaccaggactgaattgggatatttcccccaaaaatggccttaagacatttttctctcgagaaaattataaagatcattccatggctccaagtttaaaagaactacgtgttttatccaacagacgtataggagaaaatttgaatgcctcagcaagttctgtagaaaatgagccggcagttagttcagcaactcaagcaaaggaaaaagttaaaaccacaattggaatggttcttcttccaaaaccaagagttccttatcctcgtttctctcgtttctcacagagagagcagaggagttatgtggacttgttggttaaatacgcaaagattcctgcaaattccaaagctgttggaataaataaaaatgactacttgcagtacttggatatgaaaaaacatgtgaacgaagaagttactgagttcctaaagtttttgcagaattctgcaaagaaatgtgcgcaggattataatatgctttctgatgatgcccgtctcttcacagagaaaattttaagagcttgcattgaacaagtgaaaaagtattcagaattctatactctccacgaggtcaccagcttaatgggattcttcccattcagagtagagatgggattaaagttagaaaaaactcttctcgcattgggcagtgtaaaatatgtgaaaacagtatttccctcaatgcctataaagttgcagctgtcaaaggacgatatagctaccattgaaacgtcagaacaaacagctgaagctatgcattatgatattagtaaagatccaaatgcagagaagcttgtttccagatatcaccctcagatagctctaactagtcagtcattatttaccttattaaataatcatggaccaacgtacaaggaacagtgggaaattccagtgtgtattcaagtaatacctgttgcaggttcaaaaccagttaaagtaatatatattaattcaccacttcccc

SEQ ID NO: 7546 - protein, 328 aa, Homo sapiens
MSSKMVISEPGLNWDISPKNGLKTFFSRENYKDHSMAPSLKELRVLSNRRIGENLNASASSVENEPAVSSATQAKEKVKTTIGMVLLPKPRVPYPRFSRFSQREQRSYVDLLVKYAKIPANSKAVGINKNDYLQYLDMKKHVNEEVTEFLKFLQNSAKKCAQDYNMLSDDARLFTEKILRACIEQVKKYSEFYTLHEVTSLMGFFPFRVEMGLKLEKTLLALGSVKYVKTVFPSMPIKLQLSKDDIATIETSEQTAEAMHYDISKDPNAEKLVSRYHPQIALTSQSLFTLLNNHGPTYKEQWEIPVCIQVIPVAGSKPVKVIYINSPL

SEQ ID NO: 7547 - DNA, 763 bp, Homo sapiens
gacggctgctcccctcctttcctcccgccacaagcgctcgctgtggttctggcagcgaagtgcgagactgggctcgccaggcggaagtggttggagactgcgtgttttcctagaaagtcctcgaccttcgtcggggagaggaggggagtgataaattggaaggcggacaagcgacaagtgcggtactggaaagacccaaacatacttggttgtgacctcaggactcaataaaataaacagctggaaataagcagactagtgtaagagtgaattgaaaagaaaacccaaggtcacatctcccaagaagcagtaatgttccagcaataagaaaaggacagttttttgtcttttgcatggtgagccttatatgaattacatcaattttgtcaccaatatccatcatcagaacattttgcctactcactgtgaagacaataaggatgaagacctttatgacaatccacttccacttaatgaataatgaggaaactggggcacagagaaattaagtgacttgtccaggaggacagggccaataaccggtggaaccataagaaaaaaatccagtaacagctttgaaaaaggaagataacaatgacctgtgtgtacagcgtccaagggaaccattagcagtggagctccccaggctcctgggacgaccaagcacatggtccaaccaaccatcttctgacaaggtaggggtgggcagtggaaggcaaaaagaatggctgcacttgtgtttctgaaggtcagaccaagaaac

SEQ ID NO: 7548 - protein, 37 aa, Homo sapiens
MNYINFVTNIHHQNILPTHCEDNKDEDLYDNPLPLNE

SEQ ID NO: 7549 - DNA, 1881 bp, Homo sapiens
ggctgctcccctcctttcctcccgccacaagcgctcgctgtggttctggcagcgaagtgcgagactgggctcgccaggcggaagtggttggagactgcgtgttttcctagaaagtcctcgaccttcgtcggggagaggaggggagtgataaattggaaggcggacaagcgacaagtgcggtactggaaagacccaaacatacttggttgtgacctcaggaggtcacatctcccaagaagcagtaatgttccagcaataagaaaaggacagttttttgtcttttgcatggtgagccttatatgaattacatcaattttgtcaccaatatccatcatcagaacattttgtggcactgtggctcgaaccaatgtccagcttccacactctctgcttggaagaggattacccttatttggaagtctcagttttgaggatttggggaaagcaggcacgcaagcagacacaccttattctctacagcatcatttatacctcaactaagtcagctgaacaaatgcctgctgaaaagttctgggagtggcatagctaagaaccagaaaggcgatctttcttttggattaagtcaacagagtcatacccacaaggagaactatcaaatatcagatgcgagaggtgaagtggggttataagattctacataacacattgcaaatggtcacaacaatcaagactatatccatagatgtcccagaaataatatctgactatacagagcagcattaccaagccaccaagaagtctgcctagtaatgacaatgataacaacagctaacacttaataatcacttgccttactgacagattcagaggaagccatcagttttttgggcagaatgaagggacaaatggtgaactggtatccgggatgctgcctagaaccctgtccatttaagaagacacccaggtgatacgcaatgcacaaaaagcactggaactcccagcaggcaagcactgcagtctataaaccctctattgagaaaggccatgacatgtctaccagggacacagatttgggaggcagaacacaagacagggtgagggtgaaaagcaatggctacctggccacgtcagccaaatcagctccaaaaatcaatgcgatgacagtggtcacaggcagatcactctcaccttataacctgggatggcacagaccagacagattatttcattttgttttttcattatttttatttacttttttggagagagggtctcactccattgcccaggctggagtccagtggtgtgatcatagctcactgtaaccttgaactcctggactcaagtgataaacctgcagctgtcttccctgagtagctgggactacaggtacacaccactacaccgggcctctcattttgcttaatttatttaattagtcaactaattttgagggagggcagattttggaagtaaagggcatagatggttctgtagtatgcggaaatctgaagctttgctaagatgggatcaacatgaagcatctgtacatgtacaaattagcaaatgttaccatgactaacagtaaaatgaagaattaaggaaattataaggttaatttccttgaagtctctcagtagtcatttgtgtctataggtgattttgtattttacaacattgtattttctaatttcatgaaaggaaagctaaccaaattcgtggattttattttttgcctcagcctcaaaaagccttagggctgattcaggcctggttgtagcaatcggctgtctcaaaggcctcctgcatgtttaaatagcttctctcctgtttattttgcactgttttatcctgtaagctgtctcgaggcccttccaatataagcatgaggatttaaatcttaataaattgagatttgaa

SEQ ID NO: 7550 - protein, 47 aa, Homo sapiens
MREVKWGYKILHNTLQMVTTIKTISIDVPEIISDYTEQHYQATKKSA

SEQ ID NO: 7551 - DNA, 529 bp, Homo sapiens
ggactcaataaaataaacagctggaaataagcagactagtgtaagagtgaattgaaaagaaaacccaaggtcacatctcccaagaagcagtaatgttccagcaataagaaaaggacagttttttgtcttttgcatggtgagccttatatgaattacatcaattttgtcaccaatatccatcatcagaacattttgattctacataacacattgcaaatggtcacaacaatcaagactatatccatagatgtcccagaaataatatctgactatacagagcagcattaccaagccaccaagaagtctgcctagtaatgacaatgataacaacagctaacacttatcaacagagcagaggaacagagccacagataactgaaaaccactttggcactgaggaggtatgcagacaagatctggaagggaatctagaaaaatggcaactttggaataatagataccttttgttttcttatcgcttttatttttgtcatgataaatattaagagtaaaaagaaaattcacattg

SEQ ID NO: 7552 - protein, 63 aa, Homo sapiens
MTMITTANTYQQSRGTEPQITENHFGTEEVCRQDLEGNLEKWQLWNNRYLLFSYRFYFCHDKY

SEQ ID NO: 7553 - DNA, 2813 bp, Homo sapiens
cctttaaagtgaagttgatgctagctgcaaacatttactcttgtatttatcttcactaggaaactgtggactgtaatttattttattaaatatttagaagattatttggcttgtgtgttcaggtgagaaatactgagttgtttttgtttaatttcatggtttttttttttttaatgatccctagtgggggaaggggaaaggaatagtctgataaacagatgtgcatattttaaaaacaagtgaccttttgggaatgtaggcatttagacgatgattttagtcgcactaggggtgggattcaaactactggtcaaagaccattttgtacagaaaagggaacatctccgatgggtgttaaggtaggagtttccatgcagccctttatgtctgagaaatagtctcctctgccattggggtccctgcggaatcttctacaggaattgcagctcttcacgtcatgctaggttaccagcatgggcttcccagagcacttcactctgtttctaactccactgacttttctgacttgtttcttgagggacttggaaaaggggaaggtattattcacacagatgtgtgtatgaagcctaaataacatccaactttttttccaaaaacatagtaagagtttaaccataaatagaagaaaaatgtattcaaaatacttaaatcaaaactagaagatggggaaaaaaagatttattctatacaaagccttgtctggaccactttagagagacttctatttttttaacccttctataaatatttgatggcacttgaaatattcctgcaataaaatgtgatttgtgtaaagaaaaaaagattttgtaatgtgaaacaaagaaagaaagtaatgtaattttctaaaaaaaaaaatacaaacaaacaaactttgtattattttcttgatggaatttgtctatctgtctttggaaaactttttatttcattgaatgtgccatagtagaaatgtgtgtttttagttttagactaaggaatagctagttgttgtgttccgacattccaaaatgcaaaacaacctagtagtatctttcatgaaaaggtttaagtagtatgtaagcttctctcattgttgcttttttgcacatgttcttcattcctctctagtgcaatatgtacatagagcacttgcgggtgtaccttgatccctcagggaaaaatacatatttgtacagttttttggggtttttttgttttttggttttttttgttttgccttttgtttttggctaaggaatgtcgatcgaatcacttgttattgttgaggggcagccagataataatcctaaagccactgtttccaacattgattgtttaaatcatatgtccttccaatgctattattttaagataataataaaaagttattttctgacagttctttgtgctgactggtgaaaaacaagggtaaataagcaccttataattgacttactgtgaatgacaatccatcttggtatcaacgatagaagccctatcattttggagttggggttaagagtcagaaacaatgtgctcagggatctcctaaaactcttaaaacagggtggccagtactactgggacaaattgtgttttttattattaataataatgataataatactatccctccaaggcacaagtgaactatatagaactgcgtgtgtgtaaactctttactctcgtctcattttgttgagtttagaacttgatgtgctcgtcagtcttgtgtttcaaaacactgaataacttccaaagcaaagttatgccagtgtgttcaaaagataaattaataatgtaccagcaaagagcatcattcaaagtatagtccttgcatattccagttaccatttctctaataattaaaatattcatgataaatatatatatagcatcatatgttaaaaactatttcaaattctacatattaaggatgaaaattttaaaatccagtaataagaggagagacctgcctatcagtacagtgatataggtaaaagatgaaatatgtttttaaaataccagcaattaactattgttttcatgggttctcctctagaagcaaaccaaaaattccttcatggaaaacaattcttacttctacatgtgtagtttatatctgatgcattacaagagctaatgtttaaagacaaaacaaaacctgcctgtatgacagcagcaactcgagccaacatttagtgttacatgttatatttttgaaataccgttttgttatcatattccacatattactttccataaagtcagagaagttcaatgtaattgttggctctgattcttccaccttgggatacacattcacaagaagatttatatattttcttactatgatagaggaacataatctgggaaaacttcccatgtctgtaagatgaaaaggatacctttaccatgttgtttttgataataaagaatatggaaaatggtagaaatctctcctctctatgtgtatttgtatatgtgtgtatacacacacacgttgacatttttacataacatgtgattgccacttcttataaagttatgatatagaaccccatgaaaacaactttatattatagatcaaataatgtgcccagaaacgcaattgcaacagtaaatcttgatctattggtaagagtctatgatacaggtcttcattctatccctaaacataatgttagtaaagaggttccatcagattgtattatagagaccttcctattgctatttatttttaagagatgagaagactgactagcaatgtctccacagtgcaattggtttcacttctgggtctgtctgtc

SEQ ID NO: 7554 - protein, 70 aa, Homo sapiens [sequence omitted]

SEQ ID NO: 7555 - DNA, 1725 bp, Homo sapiens
tctcggcgggcgggcagctgcggcagctgctgctgtggctcgggcggcggcggcgcggcggcggcagagggggctccggggtcggaccatccgctctccctgcgctctccgcaccgcggcttaaatgatgtattttgtgatcgcagcgatgaaagctcaaattgaaattattccatgcaagatctgtggagacaaatcatcaggaatccattatggtgtcattacatgtgaaggctgcaagggctttttcaggagaagtcagcaaagcaatgccacctactcctgtcctcgtcagaagaactgtttgattgatcgaaccagtagaaaccgctgccaacactgtcgattacagaaatgccttgccgtagggatgtctcgagatgctgtaaaatttggccgaatgtcaaaaaagcagagagacagcttgtatgcagaagtacagaaacaccggatgcagcagcagcagcgcgaccaccagcagcagcctggagaggctgagccgctgacgcccacctacaacatctcggccaacgggctgacggaacttcacgacgacctcagtaactacattgacgggcacacccctgaggggagtaaggcagactccgccgtcagcagcttctacctggacatacagccttccccagaccagtcaggtcttgatatcaatggaatcaaaccagaaccaatatgtgactacacaccagcatcaggcttctttccctactgttcgttcaccaacggcgagacttccccaactgtgtccatggcagaattagaacaccttgcacagaatatatctaaatcgcatctggaaacctgccaatacttgagagaagagctccagcagataacgtggcagacctttttacaggaagaaattgagaactatcaaaacaagcagcgggaggtgatgtggcaattgtgtgccatcaaaattacagaagctatacagtatgtggtggagtttgccaaacgcattgatggatttatggaactgtgtcaaaatgatcaaattgtgcttctaaaagcaggttctctagaggtggtgtttatcagaatgtgccgtgcctttgactctcagaacaacaccgtgtactttgatgggaagtatgccagccccgacgtcttcaaatccttaggttgtgaagactttattagctttgtgtttgaatttggaaagagtttatgttctatgcacctgactgaagatgaaattgcattattttctgcatttgtactgatgtcagcagatcgctcatggctgcaagaaaaggtaaaaattgaaaaactgcaacagaaaattcagctagctcttcaacacgtcctacagaagaatcaccgagaagatggaatactaacaaagttaatatgcaaggtgtctaccttaagagccttatgtggacgacatacagaaaagctaatggcatttaaagcaatatacccagacattgtgcgacttcattttcctccattatacaaggagttgttcacttcagaatttgagccagcaatgcaaattgatgggtaaatgttatcacctaagcacttctagaatgtctgaagtacaaacatgaaaaacaaacaaaaaaattaaccgagacactttatatggccctgcacagacctggagcgccacacactgcacatcttttggtgatcggggtcaggcaaaggaggggaaacaatgaaaacaaataaaagttgaacttgtttttctcatgc

SEQ ID NO: 7556 - protein, 468 aa, Homo sapiens; identical to SEQ ID NO: 1046

SEQ ID NO: 7557 - DNA, 2000 bp, Homo sapiens
gcagattcacagggcctctgagcattatcccccatactcctccccatcattctccacccagctgttggagccatctgtctgatcaccttggactccatagtacactggggcaaagcacagccccagtttctggaggcagatgggtaaccaggaaaaggcatgaatgagggggccccaggagacagtgacttagagactgaggcaagagtgccgtggtcaatcatgggtcattgtcttcgaactggacaggccagaatgtctgccacacccacacctgcaggtgaaggagccagaagctcttcaacctgtagctccctgagcaggctgttctggtctcaacttgagcacataaactgggatggagccacagccaagaactttattaatttaagggagttcttctcttttctgctccctgcattgagaaaagctcaaattgaaattattccatgcaagatctgtggagacaaatcatcaggaatccattatggtgtcattacatgtgaaggctgcaagggctttttcaggagaagtcagcaaagcaatgccacctactcctgtcctcgtcagaagaactgtttgattgatcgaaccagtagaaaccgctgccaacactgtcgattacagaaatgccttgccgtagggatgtctcgagatgctgtaaaatttggccgaatgtcaaaaaagcagagagacagcttgtatgcagaagtacagaaacaccggatgcagcagcagcagcgcgaccaccagcagcagcctggagaggctgagccgctgacgcccacctacaacatctcggccaacgggctgacggaacttcacgacgacctcagtaactacattgacgggcacacccctgaggggagtaaggcagactccgccgtcagcagcttctacctggacatacagccttccccagaccagtcaggtcttgatatcaatggaatcaaaccagaaccaatatgtgactacacaccagcatcaggcttctttccctactgttcgttcaccaacggcgagacttccccaactgtgtccatggcagaattagaacaccttgcacagaatatatctaaatcgcatctggaaacctgccaatacttgagagaagagctccagcagataacgtggcagacctttttacaggaagaaattgagaactatcaaaacaagcagcgggaggtgatgtggcaattgtgtgccatcaaaattacagaagctatacagtatgtggtggagtttgccaaacgcattgatggatttatggaactgtgtcaaaatgatcaaattgtgcttctaaaagcaggttctctagaggtggtgtttatcagaatgtgccgtgcctttgactctcagaacaacaccgtgtactttgatgggaagtatgccagccccgacgtcttcaaatccttaggttgtgaagactttattagctttgtgtttgaatttggaaagagtttatgttctatgcacctgactgaagatgaaattgcattattttctgcatttgtactgatgtcagcagatcgctcatggctgcaagaaaaggtaaaaattgaaaaactgcaacagaaaattcagctagctcttcaacacgtcctacagaagaatcaccgagaagatggaatactaacaaagttaatatgcaaggtgtctaccttaagagccttatgtggacgacatacagaaaagctaatggcatttaaagcaatatacccagacattgtgcgacttcattttcctccattatacaaggagttgttcacttcagaatttgagccagcaatgcaaattgatgggtaaatgttatcacctaagcacttctagaatgtctgaagtacaaacatgaaaaacaaacaaaaaaattaaccgagacactttatatggccctgcacagacctggagcgccacacactgcacatcttttggtgatcggggtcaggcaaaggaggggaaacaatgaaaacaaataaaagttgaacttgtttttctcatgc

SEQ ID NO: 7558 - protein, 548 aa, Homo sapiens; identical to SEQ ID NO: 1040

SEQ ID NO: 7559 - DNA, 2024 bp, Homo sapiens
gcagattcacagggcctctgagcattatcccccatactcctccccatcattctccacccagctgttggagccatctgtctgatcaccttggactccatagtacactggggcaaagcacagccccagtttctggaggcagatgggtaaccaggaaaaggcatgaatgagggggccccaggagacagtgacttagagactgaggcaagagtgccgtggtcaatcatgggtcattgtcttcgaactggacaggccagaatgtctgccacacccacacctgcaggtgaaggagccagaagggatgaactttttgggattctccaaatactccatcagtgtatcctgtcttcaggtgatgcttttgttcttactggcgtctgttgttcctggaggcagaatggcaagccaccatattcacaaaaggaagataaggaagtacaaactggatacatgaatgctcaaattgaaattattccatgcaagatctgtggagacaaatcatcaggaatccattatggtgtcattacatgtgaaggctgcaagggctttttcaggagaagtcagcaaagcaatgccacctactcctgtcctcgtcagaagaactgtttgattgatcgaaccagtagaaaccgctgccaacactgtcgattacagaaatgccttgccgtagggatgtctcgagatgctgtaaaatttggccgaatgtcaaaaaagcagagagacagcttgtatgcagaagtacagaaacaccggatgcagcagcagcagcgcgaccaccagcagcagcctggagaggctgagccgctgacgcccacctacaacatctcggccaacgggctgacggaacttcacgacgacctcagtaactacattgacgggcacacccctgaggggagtaaggcagactccgccgtcagcagcttctacctggacatacagccttccccagaccagtcaggtcttgatatcaatggaatcaaaccagaaccaatatgtgactacacaccagcatcaggcttctttccctactgttcgttcaccaacggcgagacttccccaactgtgtccatggcagaattagaacaccttgcacagaatatatctaaatcgcatctggaaacctgccaatacttgagagaagagctccagcagataacgtggcagacctttttacaggaagaaattgagaactatcaaaacaagcagcgggaggtgatgtggcaattgtgtgccatcaaaattacagaagctatacagtatgtggtggagtttgccaaacgcattgatggatttatggaactgtgtcaaaatgatcaaattgtgcttctaaaagcaggttctctagaggtggtgtttatcagaatgtgccgtgcctttgactctcagaacaacaccgtgtactttgatgggaagtatgccagccccgacgtcttcaaatccttaggttgtgaagactttattagctttgtgtttgaatttggaaagagtttatgttctatgcacctgactgaagatgaaattgcattattttctgcatttgtactgatgtcagcagatcgctcatggctgcaagaaaaggtaaaaattgaaaaactgcaacagaaaattcagctagctcttcaacacgtcctacagaagaatcaccgagaagatggaatactaacaaagttaatatgcaaggtgtctaccttaagagccttatgtggacgacatacagaaaagctaatggcatttaaagcaatatacccagacattgtgcgacttcattttcctccattatacaaggagttgttcacttcagaatttgagccagcaatgcaaattgatgggtaaatgttatcacctaagcacttctagaatgtctgaagtacaaacatgaaaaacaaacaaaaaaattaaccgagacactttatatggccctgcacagacctggagcgccacacactgcacatcttttggtgatcggggtcaggcaaaggaggggaaacaatgaaaacaaataaaagttgaacttgtttttctcatgc

SEQ ID NO: 7560 - protein, 556 aa, Homo sapiens; identical to SEQ ID NO: 1042

SEQ ID NO: 7561 - DNA, 2168 bp, Homo sapiens
ctctgttctcctcctcccctcttttccccacctcccaaaattggcagccagtctgtggctctcggtctggggtctggagggtggggaatgtgggtgtgggggccggctggagaagctctcgctagcgctgcctgtggccagacccgcctcttgtcccctttcgggcgcacacacacgtccacccagacactccgcgcgctccctcgcgcttttgcttgcccgcccgccgccgcctgctttttccctcctgctttcgccggtcgccttctccttctttttttttttttttttttttttttttttttttttttttttttggtaccatagagttgctctgaaaacagaagatagagggagtctcggagctcgccatctccagcgatctctacattgggaaaaaacatggagtcagctccggcagcccccgaccccgccgccagcgagccaggcagcagcggcgcggacgcggccgccggctccagggagaccccgctgaaccaggaatccgcccgcaagagcgagccgcctgccccggtgcgcagacagagctattccagcaccagcagaggtatctcagtaacgaagaagacacatacatctcaaattgaaattattccatgcaagatctgtggagacaaatcatcaggaatccattatggtgtcattacatgtgaaggctgcaagggctttttcaggagaagtcagcaaagcaatgccacctactcctgtcctcgtcagaagaactgtttgattgatcgaaccagtagaaaccgctgccaacactgtcgattacagaaatgccttgccgtagggatgtctcgagatgctgtaaaatttggccgaatgtcaaaaaagcagagagacagcttgtatgcagaagtacagaaacaccggatgcagcagcagcagcgcgaccaccagcagcagcctggagaggctgagccgctgacgcccacctacaacatctcggccaacgggctgacggaacttcacgacgacctcagtaactacattgacgggcacacccctgaggggagtaaggcagactccgccgtcagcagcttctacctggacatacagccttccccagaccagtcaggtcttgatatcaatggaatcaaaccagaaccaatatgtgactacacaccagcatcaggcttctttccctactgttcgttcaccaacggcgagacttccccaactgtgtccatggcagaattagaacaccttgcacagaatatatctaaatcgcatctggaaacctgccaatacttgagagaagagctccagcagataacgtggcagacctttttacaggaagaaattgagaactatcaaaacaagcagcgggaggtgatgtggcaattgtgtgccatcaaaattacagaagctatacagtatgtggtggagtttgccaaacgcattgatggatttatggaactgtgtcaaaatgatcaaattgtgcttctaaaagcaggttctctagaggtggtgtttatcagaatgtgccgtgcctttgactctcagaacaacaccgtgtactttgatgggaagtatgccagccccgacgtcttcaaatccttaggttgtgaagactttattagctttgtgtttgaatttggaaagagtttatgttctatgcacctgactgaagatgaaattgcattattttctgcatttgtactgatgtcagcagatcgctcatggctgcaagaaaaggtaaaaattgaaaaactgcaacagaaaattcagctagctcttcaacacgtcctacagaagaatcaccgagaagatggaatactaacaaagttaatatgcaaggtgtctaccttaagagccttatgtggacgacatacagaaaagctaatggcatttaaagcaatatacccagacattgtgcgacttcattttcctccattatacaaggagttgttcacttcagaatttgagccagcaatgcaaattgatgggtaaatgttatcacctaagcacttctagaatgtctgaagtacaaacatgaaaaacaaacaaaaaaattaaccgagacactttatatggccctgcacagacctggagcgccacacactgcacatcttttggtgatcggggtcaggcaaaggaggggaaacaatgaaaacaaataaaagttgaacttgtttttctcatgc

SEQ ID NO: 7562 - protein, 523 aa, Homo sapiens; identical to SEQ ID NO: 1044

SEQ ID NO: 7563 - DNA, 462 bp, Homo sapiens
aggtcacatctcccaagaagcagtaatgttccagcaataagaaaaggacagttttttgtcttttgcatggtgagccttatatgaattacatcaattttgtcaccaatatccatcatcagaacattttgattctacataacacattgcaaatggtcacaacaatcaagactatatccatagatgtcccagaaataatatctgactatacagagcagcattaccaagccaccaagaagtctgcctagtaatgacaatgataacaacagctaacacttatcaacagagcagaggaacagagccacagataactgaaaaccactttggcactgaggaggtatgcagacaagatctggaagggaatctagaaaaatggcaactttggaataatagataccttttgttttcttatcgcttttatttttgtcatgataaatattaagagtaaaaagaaaattcacattg

SEQ ID NO: 7564 - protein, 63 aa, Homo sapiens; identical to SEQ ID NO: 7552

SEQ ID NO: 7565 - DNA, 698 bp, Homo sapiens
gtcacatctcccaagaagcagtaatgttccagcaataagaaaaggacagttttttgtcttttgcatggtgagccttatatgaattacatcaattttgtcaccaatatccatcatcagaacattttgattctacataacacattgcaaatggtcacaacaatcaagactatatccatagatgtcccagaaataatatctgactatacagagcagcattaccaagccaccaagaagtctgcctagtaatgacaatgataacaacagctaacacttaggatttgatttaggacaaattgttatttggatggatgcttgtctattgagagagtaattgttaaactaaaggaaactggtcacaaatactttagcagtggctataaatgaccagtgggccaaggattttgagatcgtgagagacttctccgggaatgttgtcattcatttcactccagtgtggctcttttcctccatctgcgctcacttttctaggagaactatggccactatggagaatatgaaaacattgctgaaggaggtgaaagccatttcagaagaagagttatatattagcttttggcagtgacagcgttatgggcacggacattcagcctttccagttgactgctttgaaggggcaatgttcacgtggaagtatacctcctagtatgtttgctaaaataaaatcagcttcattacct

SEQ ID NO: 7566 - protein, 54 aa, Homo sapiens
MNYINFVTNIHHQNILILHNTLQMVTTIKTISIDVPEIISDYTEQHYQATKKSA

SEQ ID NO: 7567 - DNA, 682 bp, Homo sapiens
aagcaggcacgcaagcagacacaccttattctctacagcatcatttatacctcaactaagtcagctgaacaaatgcctgctgaaaagttctgggagtggcatagctaagaaccagaaaggcgatctttcttttggattaagtcaacagagtcatacccacaaggagaactatcaaatatcagatgcgagaggtgaagtggggttataaggtgagagctgagaagggagaaacaggggatttgatttaggacaaattgttatttggatggatgcttgtctattgagagagtaattgttaaactaaaggaaactggtcacaaatactttagcagtggctataaatgaccagtgggccaaggattttgagatcgtgagagacttctccgggaatgttgtcattcatttcactccagtgtggctcttttcctccatctgcgctcacttttctaggagaactatggccactatggagaatatgaaaacattgctgaaggaggtgaaagccatttcagaagaagagttatatattagcttttggcagtgacagcgttatgggcacggacattcagcctttccagttgactgctttgaaggggcaatgttcacgtggaagtatacctcctagtatgtttgctaaaataaaatcagcttcattacctaataacataaatgactttgggag

SEQ ID NO: 7568 - protein, 42 aa, Homo sapiens [sequence omitted]

SEQ ID NO: 7569 - DNA, 726 bp, Homo sapiens
tgtgttgctcaggctggtcttgaactcttgtgctcacatcttcctctcagctcagcctcccaaactgctggggctacaggtgtgagccactgtgcccagcctatatgtgcttcttatgtatatcatagattgtggccttactctatattagttcttgcattgctatttagctttccctacacaggcctcatctctacaactagaccataaactgcttgagggaaagatgtggtcttctatgtctttggatcccttacagtgcttacatagtgcttggtcccaagggagtgctcatagtattcttttttattggcagattctacataacacattgcaaatggtcacaacaatcaagactatatccatagatgtcccagaaataatatctgactatacagagcagcattaccaagccaccaagaagtctgcctagtaatgacaatgataacaacagctaacacttagaaaggaaatacaatgaactgttctcttcgagatccagaataaaagttctggcagctagaacaccgtttttatacaccgaacccctcgtgctctccctgcttttttttgttgttgttgttgtgcttaatgttagaaaataacattactactatgaaacgaagagaattttttttcaaaaccatgtcttgccattagagatgagacaaggcaacaccatgctaatacgctgttgatgtaaaaataaaagttttttttcccttc

SEQ ID NO: 7570 - protein, 68 aa, Homo sapiens [sequence omitted]

SEQ ID NO: 7571 - DNA, 435 bp, Homo sapiens
atgctgcctagaaccctgtccatttaagaagacacccaggtgatacgcaatgcacaaaaagcactggaactcccagcagaacaaaaccttttccatcagcaaagcattttagaacctcaagctacactgttcccacctgcaactgtctaaggtattggaggtcaaggacagtccaaggccaagtcaaggaccatcaggacacagaggagtaacttctgaggcagcccccggtggtaacataaaagcttaatatgcatcagacaagtgccttcgctgtgagatgttggggaaccaagcccagtggggtggctggcgtcagctcagtgttccagaaaagccaaactgttcaccacgacttgccctgattttgccttcactgctattcaaagaggcctgaagcagttactgaaagcaattccaagaaattgagttaaa

SEQ ID NO: 7572 - protein, 38 aa, Homo sapiens
MLGNQAQWGGWRQLSVPEKPNCSPRLALILPSLLFKEA

SEQ ID NO: 7573 - DNA, 4575 bp, Homo sapiens
atccaaggcacgaaccagccatgggcacagaccaagagccaagatgggataaacaagggttgctttatccctggatgacatgagatggacatcaccacattaaaggttcttaagctagagagtaacaggaagtatctgtatgtattcaaggttacaagatgttcacctaagattgagacctagtgactacatttcctacgggaacaaataaatggtttttcatctcccggagatacattacaaacaaatatggtgctaaaagaactccttacctttctctgactacaatttatttggacatacttttgtattgaagagaggtatacatactgaagctacttgctgtactataggagactctgtcctgtaggatcatggaccatcctagtagggaaaaggatgaaagacaacggacaactaaacccatggcacaaaggagtgcacactgctctcgaccatctggctcctcatcgtcctctggggttcttatggtgggacccaacttcagggttggcaagaagataggatgtgggaacttcggagagctcagattaggtaaaaatctctacaccaatgaatatgtagcaatcaaactggaaccaataaaatcacgtgctccacagcttcatttagagtacagattttataaacagcttggcagtgcaggtgaaggtctcccacaggtgtattactttggaccatgtgggaaatataatgccatggtgctggagctccttggccctagcttggaggacttgtttgacctctgtgaccgaacatttactttgaagacggtgttaatgatagccatccagctgctttctcgaatggaatacgtgcactcaaagaacctcatttaccgagatgtcaagccagagaacttcctgattggtcgacaaggcaataagaaagagcatgttatacacattatagactttggactggccaaggaatacattgaccccgaaaccaaaaaacacataccttatagggaacacaaaagtttaactggaactgcaagatatatgtctatcaacacgcatcttggcaaagagcaaagccggagagatgatttggaagccctaggccatatgttcatgtatttccttcgaggcagcctcccctggcaaggactcaaggctgacacattaaaagagagatatcaaaaaattggtgacaccaaaaggaatactcccattgaagctctctgtgagaactttccagaggagatggcaacctaccttcgatatgtcaggcgactggacttctttgaaaaacctgattatgagtatttacggaccctcttcacagacctctttgaaaagaaaggctacacctttgactatgcctatgattgggttgggagacctattcctactccagtagggtcagttcacgtagattctggtgcatctgcaataactcgagaaagccacacacatagggatcggccatcacaacagcagcctcttcgaaatcagagccttaggactgttacagctgagcattatgatgttaacaactcagccatctggcacaggggaagaggcacctaaacagattcttctggacaaaagtcacatatgagcaagatcagaatagtagcagatgtaaaaagcagaatgtatcatcagagcgccgaggagagtgggaaattcagcccagccggcagaccaatacctcatacctaacgtctcacttggctgcagaccgccatgggggatcagtgcaggtggttagctcaaccaatggagagctgaatgttgatgatcccacgggagcccactccaatgcaccaatcacagctcatgccgaggtggaggtagtggaggaagctaagtgctgctgtttctttaagaggaaaaggaagaagactgctcagcgccacaagtgaccagtgcctcccaggagtcctcaggccctggggactctgactcaattgtacctgcagctcctgccatttctcattggaagggactcctctttgggggagggtggatatccaaaccaaaaagaagaaaacagatgcccccagaaggggccagtgcgggcagccagggcctagtgggtcattggccatctccgcctgcctaaggctctgagcaggtcccagagctgctgttcctccactgcttgcccatagggctgcctggttgactctccttcccattgtttacagtgaaggtgtcattcacaaaaactcaaggactgctattctccttcttccccttagtttactcctggtttttaccccaccctcaaccctctccagcataaaacctagtgagctaaaggctttgtctgcagaaggagatcaagaggctgggggtaaggccaagaaggtaggaggaaaatggcagacctgggctggagaagaaccttctccgtatcccaggtgtgcctggcagtatggtttcctcttcctctgtgcctgtgcagcattcatcccagctggccttggggttcaggttccttcttccctccctcctgtgaagttacactgtaggacacaagctgtgagcaatctgcagtctactgtccctgtgtgttggcgttcttagcttttttgacaaactcttttctccaggtagtaggacaatgaaaattgttctaagcaaaggaaagaaaactgactttgttgcacttttagtttttttaaaaaaaacaaaaacaaaaacatggcagatgcatattgtgtctggttatattgggggttttacttttacctgttttgagggggatggggccggccaagccattcagagagaacatgggtccagaggacattctcagtggaaagagtttgatctgcagcacccagaagagaagccaaactcggtgtcattctgagtgaacactcaggttggcaagaaaacatacttgaattttcattcatcttctcagcagctgaagaatgtccctaccagagcatcttgacctaatcagcttacagtttgaaaacctagctctccagaacatgagatgagccagccgagccagactgtgaccaggaaacagctcatcccagagaaggagatgcttaacaaaaaaaaattgaaattgtttcccatgctgccagggacttccaactagatagccatgtgacgtcctggtgacttgggggaaaaattagtgatgaaacagccaccaccatattgccattagtggaaaaaaagaggacagtgaacctgccttccacctgccagagggacctcagggtgtggcattatagggccaggaaaagaaaatcggtgtatcctatctgccccaatagctgagctgtagcatttgggctggcctgccttatcagaaaccaagcttatgaagatcttctcccagcaggtccatagcagtaggcttaggatgcagtatatggggccgcatttaaaaggagggaaagattgtttggtgctggaacattccagggaaaaggagactggaatgaaaggtctgaaattatcttctcaattggactccttccagaaaggtggccgtgcctctaagcatgtttttcccagtatgccctaggcctccccccatggtgttttcatatgaggtactactgtgaaggatctggttcctcattcactgtttgacaagtctttcatgtgtggagttactcttctcatgcccaattttcatttgagtttagtggcttaaccaaacaatgactcctcattccagcggtgacagaagagaaagggtcatttacatcaggaaagaggtcttgtatctgggagtagagagctaaccatggagcacagtggctggtgggtgacttagtctgatggtttgtggaccatagaagtcttcacctctggtttgaggtgcagggctgtcttttgtactggagggtgtggggatattttctgatagttgccatttcttgaaaaattcccttgatgtaccttacacagagcagaaataacattaacatggatcagaggtactgggcttcatctgttccattggaccttggctagggaatatcatttcactggcatcaaacctgcttagcttatgaaaagatggtaatatgtcatttctataaatgtttctatatatgaaacataaagtggcagggagatacaatatcacaccccttccccacaaggactgtgaatattgggatttatgtccttgccattacctagtggttacagccctatcactaaaatttacatcgtttctcagttgggatttgggcattgctaacttactgtatagaaagtttaacttttcctcacccctgtatagaaaatgccttgcctctcaagagagggcagagggggggccaggtgcagtggctcacgcctgtaatcccagcagtttgggaggccaaggcaagtggatcatgtgaggtcaagagttcgagaccagcctggccaacatggtgaaaccccgtctctacaaaaaatacaaaaattagctgggcatggtggcatgctcccgtagtcccagctactcgggaggctgaggcaggagaatcacttgagcctgggaggcagaagttgcagtgagccgagatcgcaccactgcactccagcctgggcaacagagtgagactctgtctaa

SEQ ID NO: 7574 - protein, 393 aa, Homo sapiens
MDHPSREKDERQRTTKPMAQRSAHCSRPSGSSSSSGVLMVGPNFRVGKKIGCGNFGELRLGKNLYTNEYVAIKLEPIKSRAPQLHLEYRFYKQLGSAGEGLPQVYYFGPCGKYNAMVLELLGPSLEDLFDLCDRTFTLKTVLMIAIQLLSRMEYVHSKNLIYRDVKPENFLIGRQGNKKEHVIHIIDFGLAKEYIDPETKKHIPYREHKSLTGTARYMSINTHLGKEQSRRDDLEALGHMFMYFLRGSLPWQGLKADTLKERYQKIGDTKRNTPIEALCENFPEEMATYLRYVRRLDFFEKPDYEYLRTLFTDLFEKKGYTFDYAYDWVGRPIPTPVGSVHVDSGASAITRESHTHRDRPSQQQPLRNQSLRTVTAEHYDVNNSAIWHRGRGT

SEQ ID NO: 7575 - DNA, 4625 bp, Homo sapiens
ggcggggccgcgctagtggttccggttcggctccagccgcccctcggctcctcgccttccccctcccgtccgccttctcccctccctcccgctcctgggaaagagagaaaccaccgctgcgggtgggtagagaagcacttggcgcctcggggaggggaccgcgcccgcctcatttgcgccttgcagcactgctggaccaggttacaagatgttcacctaagattgagacctagtgactacatttcctacgggaacaaataaatggtttttcatctcccggagatacattacaaacaaatatggtgctaaaagaactccttacctttctctgactacaatttatttggacatacttttgtattgaagagaggtatacatactgaagctacttgctgtactataggagactctgtcctgtaggatcatggaccatcctagtagggaaaaggatgaaagacaacggacaactaaacccatggcacaaaggagtgcacactgctctcgaccatctggctcctcatcgtcctctggggttcttatggtgggacccaacttcagggttggcaagaagataggatgtgggaacttcggagagctcagattaggtaaaaatctctacaccaatgaatatgtagcaatcaaactggaaccaataaaatcacgtgctccacagcttcatttagagtacagattttataaacagcttggcagtgcaggtgaaggtctcccacaggtgtattactttggaccatgtgggaaatataatgccatggtgctggagctccttggccctagcttggaggacttgtttgacctctgtgaccgaacatttactttgaagacggtgttaatgatagccatccagctgctttctcgaatggaatacgtgcactcaaagaacctcatttaccgagatgtcaagccagagaacttcctgattggtcgacaaggcaataagaaagagcatgttatacacattatagactttggactggccaaggaatacattgaccccgaaaccaaaaaacacataccttatagggaacacaaaagtttaactggaactgcaagatatatgtctatcaacacgcatcttggcaaagagcaaagccggagagatgatttggaagccctaggccatatgttcatgtatttccttcgaggcagcctcccctggcaaggactcaaggctgacacattaaaagagagatatcaaaaaattggtgacaccaaaaggaatactcccattgaagctctctgtgagaactttccagaggagatggcaacctaccttcgatatgtcaggcgactggacttctttgaaaaacctgattatgagtatttacggaccctcttcacagacctctttgaaaagaaaggctacacctttgactatgcctatgattgggttgggagacctattcctactccagtagggtcagttcacgtagattctggtgcatctgcaataactcgagaaagccacacacatagggatcggccatcacaacagcagcctcttcgaaatcagagccttaggactgttacagctgagcattatgatgttaacaactcagccatctggcacaggggaagaggcacctaaacagattcttctggacaaaagtcacatatgagcaagatcagaatagtagcagatgtaaaaagcagaatgtatcatcagagcgccgaggagagtgggaaattcagcccagccggcagaccaatacctcatacctaacgtctcacttggctgcagaccgccatgggggatcagtgcaggtggttagctcaaccaatggagagctgaatgttgatgatcccacgggagcccactccaatgcaccaatcacagctcatgccgaggtggaggtagtggaggaagctaagtgctgctgtttctttaagaggaaaaggaagaagactgctcagcgccacaagtgaccagtgcctcccaggagtcctcaggccctggggactctgactcaattgtacctgcagctcctgccatttctcattggaagggactcctctttgggggagggtggatatccaaaccaaaaagaagaaaacagatgcccccagaaggggccagtgcgggcagccagggcctagtgggtcattggccatctccgcctgcctaaggctctgagcaggtcccagagctgctgttcctccactgcttgcccatagggctgcctggttgactctccttcccattgtttacagtgaaggtgtcattcacaaaaactcaaggactgctattctccttcttccccttagtttactcctggtttttaccccaccctcaaccctctccagcataaaacctagtgagctaaaggctttgtctgcagaaggagatcaagaggctgggggtaaggccaagaaggtaggaggaaaatggcagacctgggctggagaagaaccttctccgtatcccaggtgtgcctggcagtatggtttcctcttcctctgtgcctgtgcagcattcatcccagctggccttggggttcaggttccttcttccctccctcctgtgaagttacactgtaggacacaagctgtgagcaatctgcagtctactgtccctgtgtgttggcgttcttagcttttttgacaaactcttttctccaggtagtaggacaatgaaaattgttctaagcaaaggaaagaaaactgactttgttgcacttttagtttttttaaaaaaaacaaaaacaaaaacatggcagatgcatattgtgtctggttatattgggggttttacttttacctgttttgagggggatggggccggccaagccattcagagagaacatgggtccagaggacattctcagtggaaagagtttgatctgcagcacccagaagagaagccaaactcggtgtcattctgagtgaacactcaggttggcaagaaaacatacttgaattttcattcatcttctcagcagctgaagaatgtccctaccagagcatcttgacctaatcagcttacagtttgaaaacctagctctccagaacatgagatgagccagccgagccagactgtgaccaggaaacagctcatcccagagaaggagatgcttaacaaaaaaaaattgaaattgtttcccatgctgccagggacttccaactagatagccatgtgacgtcctggtgacttgggggaaaaattagtgatgaaacagccaccaccatattgccattagtggaaaaaaagaggacagtgaacctgccttccacctgccagagggacctcagggtgtggcattatagggccaggaaaagaaaatcggtgtatcctatctgccccaatagctgagctgtagcatttgggctggcctgccttatcagaaaccaagcttatgaagatcttctcccagcaggtccatagcagtaggcttaggatgcagtatatggggccgcatttaaaaggagggaaagattgtttggtgctggaacattccagggaaaaggagactggaatgaaaggtctgaaattatcttctcaattggactccttccagaaaggtggccgtgcctctaagcatgtttttcccagtatgccctaggcctccccccatggtgttttcatatgaggtactactgtgaaggatctggttcctcattcactgtttgacaagtctttcatgtgtggagttactcttctcatgcccaattttcatttgagtttagtggcttaaccaaacaatgactcctcattccagcggtgacagaagagaaagggtcatttacatcaggaaagaggtcttgtatctgggagtagagagctaaccatggagcacagtggctggtgggtgacttagtctgatggtttgtggaccatagaagtcttcacctctggtttgaggtgcagggctgtcttttgtactggagggtgtggggatattttctgatagttgccatttcttgaaaaattcccttgatgtaccttacacagagcagaaataacattaacatggatcagaggtactgggcttcatctgttccattggaccttggctagggaatatcatttcactggcatcaaacctgcttagcttatgaaaagatggtaatatgtcatttctataaatgtttctatatatgaaacataaagtggcagggagatacaatatcacaccccttccccacaaggactgtgaatattgggatttatgtccttgccattacctagtggttacagccctatcactaaaatttacatcgtttctcagttgggatttgggcattgctaacttactgtatagaaagtttaacttttcctcacccctgtatagaaaatgccttgcctctcaagagagggcagagggggggccaggtgcagtggctcacgcctgtaatcccagcagtttgggaggccaaggcaagtggatcatgtgaggtcaagagttcgagaccagcctggccaacatggtgaaaccccgtctctacaaaaaatacaaaaattagctgggcatggtggcatgctcccgtagtcccagctactcgggaggctgaggcaggagaatcacttgagcctgggaggcagaagttgcagtgagccgagatcgcaccactgcactccagcctgggcaacagagtgagactctgtctaa

SEQ ID NO: 7576 - protein, 393 aa, Homo sapiens; identical to SEQ ID NO: 7574

SEQ ID NO: 7577 - DNA, 4789 bp, Homo sapiens
gggtccttgtccagtgaaacaccctcggctgggaagtcagttcgttctctcctctcctctcttcttgtttgaacatggtgcggactaaagcagacagtgttccaggcacttacagaaaagtggtggctgctcgagcccccagaaaggtgcttggttcttccacctctgccactaattcgacatcagtttcatcgaggaaagctgaaaataaatatgcaggagggaaccccgtttgcgtgcgcccaactcccaagtggcaaaaaggaattggagaattctttaggttgtcccctaaagattctgaaaaagagaatcagattcctgaagaggcaggaagcagtggcttaggaaaagcaaagagaaagttacaagatgttcacctaagattgagacctagtgactacatttcctacgggaacaaataaatggtttttcatctcccggagatacattacaaacaaatatggtgctaaaagaactccttacctttctctgactacaatttatttggacatacttttgtattgaagagaggtatacatactgaagctacttgctgtactataggagactctgtcctgtaggatcatggaccatcctagtagggaaaaggatgaaagacaacggacaactaaacccatggcacaaaggagtgcacactgctctcgaccatctggctcctcatcgtcctctggggttcttatggtgggacccaacttcagggttggcaagaagataggatgtgggaacttcggagagctcagattaggtaaaaatctctacaccaatgaatatgtagcaatcaaactggaaccaataaaatcacgtgctccacagcttcatttagagtacagattttataaacagcttggcagtgcaggtgaaggtctcccacaggtgtattactttggaccatgtgggaaatataatgccatggtgctggagctccttggccctagcttggaggacttgtttgacctctgtgaccgaacatttactttgaagacggtgttaatgatagccatccagctgctttctcgaatggaatacgtgcactcaaagaacctcatttaccgagatgtcaagccagagaacttcctgattggtcgacaaggcaataagaaagagcatgttatacacattatagactttggactggccaaggaatacattgaccccgaaaccaaaaaacacataccttatagggaacacaaaagtttaactggaactgcaagatatatgtctatcaacacgcatcttggcaaagagcaaagccggagagatgatttggaagccctaggccatatgttcatgtatttccttcgaggcagcctcccctggcaaggactcaaggctgacacattaaaagagagatatcaaaaaattggtgacaccaaaaggaatactcccattgaagctctctgtgagaactttccagaggagatggcaacctaccttcgatatgtcaggcgactggacttctttgaaaaacctgattatgagtatttacggaccctcttcacagacctctttgaaaagaaaggctacacctttgactatgcctatgattgggttgggagacctattcctactccagtagggtcagttcacgtagattctggtgcatctgcaataactcgagaaagccacacacatagggatcggccatcacaacagcagcctcttcgaaatcagagccttaggactgttacagctgagcattatgatgttaacaactcagccatctggcacaggggaagaggcacctaaacagattcttctggacaaaagtcacatatgagcaagatcagaatagtagcagatgtaaaaagcagaatgtatcatcagagcgccgaggagagtgggaaattcagcccagccggcagaccaatacctcatacctaacgtctcacttggctgcagaccgccatgggggatcagtgcaggtggttagctcaaccaatggagagctgaatgttgatgatcccacgggagcccactccaatgcaccaatcacagctcatgccgaggtggaggtagtggaggaagctaagtgctgctgtttctttaagaggaaaaggaagaagactgctcagcgccacaagtgaccagtgcctcccaggagtcctcaggccctggggactctgactcaattgtacctgcagctcctgccatttctcattggaagggactcctctttgggggagggtggatatccaaaccaaaaagaagaaaacagatgcccccagaaggggccagtgcgggcagccagggcctagtgggtcattggccatctccgcctgcctaaggctctgagcaggtcccagagctgctgttcctccactgcttgcccatagggctgcctggttgactctccttcccattgtttacagtgaaggtgtcattcacaaaaactcaaggactgctattctccttcttccccttagtttactcctggtttttaccccaccctcaaccctctccagcataaaacctagtgagctaaaggctttgtctgcagaaggagatcaagaggctgggggtaaggccaagaaggtaggaggaaaatggcagacctgggctggagaagaaccttctccgtatcccaggtgtgcctggcagtatggtttcctcttcctctgtgcctgtgcagcattcatcccagctggccttggggttcaggttccttcttccctccctcctgtgaagttacactgtaggacacaagctgtgagcaatctgcagtctactgtccctgtgtgttggcgttcttagcttttttgacaaactcttttctccaggtagtaggacaatgaaaattgttctaagcaaaggaaagaaaactgactttgttgcacttttagtttttttaaaaaaaacaaaaacaaaaacatggcagatgcatattgtgtctggttatattgggggttttacttttacctgttttgagggggatggggccggccaagccattcagagagaacatgggtccagaggacattctcagtggaaagagtttgatctgcagcacccagaagagaagccaaactcggtgtcattctgagtgaacactcaggttggcaagaaaacatacttgaattttcattcatcttctcagcagctgaagaatgtccctaccagagcatcttgacctaatcagcttacagtttgaaaacctagctctccagaacatgagatgagccagccgagccagactgtgaccaggaaacagctcatcccagagaaggagatgcttaacaaaaaaaaattgaaattgtttcccatgctgccagggacttccaactagatagccatgtgacgtcctggtgacttgggggaaaaattagtgatgaaacagccaccaccatattgccattagtggaaaaaaagaggacagtgaacctgccttccacctgccagagggacctcagggtgtggcattatagggccaggaaaagaaaatcggtgtatcctatctgccccaatagctgagctgtagcatttgggctggcctgccttatcagaaaccaagcttatgaagatcttctcccagcaggtccatagcagtaggcttaggatgcagtatatggggccgcatttaaaaggagggaaagattgtttggtgctggaacattccagggaaaaggagactggaatgaaaggtctgaaattatcttctcaattggactccttccagaaaggtggccgtgcctctaagcatgtttttcccagtatgccctaggcctccccccatggtgttttcatatgaggtactactgtgaaggatctggttcctcattcactgtttgacaagtctttcatgtgtggagttactcttctcatgcccaattttcatttgagtttagtggcttaaccaaacaatgactcctcattccagcggtgacagaagagaaagggtcatttacatcaggaaagaggtcttgtatctgggagtagagagctaaccatggagcacagtggctggtgggtgacttagtctgatggtttgtggaccatagaagtcttcacctctggtttgaggtgcagggctgtcttttgtactggagggtgtggggatattttctgatagttgccatttcttgaaaaattcccttgatgtaccttacacagagcagaaataacattaacatggatcagaggtactgggcttcatctgttccattggaccttggctagggaatatcatttcactggcatcaaacctgcttagcttatgaaaagatggtaatatgtcatttctataaatgtttctatatatgaaacataaagtggcagggagatacaatatcacaccccttccccacaaggactgtgaatattgggatttatgtccttgccattacctagtggttacagccctatcactaaaatttacatcgtttctcagttgggatttgggcattgctaacttactgtatagaaagtttaacttttcctcacccctgtatagaaaatgccttgcctctcaagagagggcagagggggggccaggtgcagtggctcacgcctgtaatcccagcagtttgggaggccaaggcaagtggatcatgtgaggtcaagagttcgagaccagcctggccaacatggtgaaaccccgtctctacaaaaaatacaaaaattagctgggcatggtggcatgctcccgtagtcccagctactcgggaggctgaggcaggagaatcacttgagcctgggaggcagaagttgcagtgagccgagatcgcaccactgcactccagcctgggcaacagagtgagactctgtctaa

SEQ ID NO: 7578 - protein, 393 aa, Homo sapiens; identical to SEQ ID NO: 7574

SEQ ID NO: 7579 - DNA, 2683 bp, Homo sapiens
atccaaggcacgaaccagccatgggcacagaccaagagccaagatgggataaacaagggttgctttatccctggatgacatgagatggacatcaccacattaaaggttcttaagctagagagtaacaggaagtatctgtatgtattcaaggttacaagatgttcacctaagattgagacctagtgactacatttcctacgggaacaaataaatggtttttcatctcccggagatacattacaaacaaatatggtgctaaaagaactccttacctttctctgactacaatttatttggacatacttttgtattgaagagaggtatacatactgaagctacttgctgtactataggagactctgtcctgtaggatcatggaccatcctagtagggaaaaggatgaaagacaacggacaactaaacccatggcacaaaggagtgcacactgctctcgaccatctggctcctcatcgtcctctggggttcttatggtgggacccaacttcagggttggcaagaagataggatgtgggaacttcggagagctcagattaggtaaaaatctctacaccaatgaatatgtagcaatcaaactggaaccaataaaatcacgtgctccacagcttcatttagagtacagattttataaacagcttggcagtgcaggtgaaggtctcccacaggtgtattactttggaccatgtgggaaatataatgccatggtgctggagctccttggccctagcttggaggacttgtttgacctctgtgaccgaacatttactttgaagacggtgttaatgatagccatccagctgctttctcgaatggaatacgtgcactcaaagaacctcatttaccgagatgtcaagccagagaacttcctgattggtcgacaaggcaataagaaagagcatgttatacacattatagactttggactggccaaggaatacattgaccccgaaaccaaaaaacacataccttatagggaacacaaaagtttaactggaactgcaagatatatgtctatcaacacgcatcttggcaaagagcaaagccggagagatgatttggaagccctaggccatatgttcatgtatttccttcgaggcagcctcccctggcaaggactcaaggctgacacattaaaagagagatatcaaaaaattggtgacaccaaaaggaatactcccattgaagctctctgtgagaactttccagaggagatggcaacctaccttcgatatgtcaggcgactggacttctttgaaaaacctgattatgagtatttacggaccctcttcacagacctctttgaaaagaaaggctacacctttgactatgcctatgattgggttgggagacctattcctactccagtagggtcagttcacgtagattctggtgcatctgcaataactcgagaaagccacacacatagggatcggccatcacaacagcagcctcttcgaaatcagagccttaggactgttacagctgagcattatgatgttaacaactcagccatctggcacaggggaagaggcacctaaacagattcttctggacaaaagtcacatatgagcaagatcagaatagtagcagatgtaaaaagcagaatgtatcatcagagcgccgaggagagtgggaaattcagcccagccggcagaccaatacctcatacctaacgtctcacttggctgcagaccgccatgggggatcagtgcaggtggttagctcaaccaatggagagctgaatgttgatgatcccacgggagcccactccaatgcaccaatcacagctcatgccgaggtggaggtagtggaggaagctaagtgctgctgtttctttaagaggaaaaggaagaagactgctcagcgccacaagtgaccagtgcctcccaggagtcctcaggccctggggactctgactcaattgtacctgcagctcctgccatttctcattggaagggactcctctttgggggagggtggatatccaaaccaaaaagaagaaaacagatgcccccagaaggggccagtgcgggcagccagggcctagtgggtcattggccatctccgcctgcctaaggctctgagcaggtcccagagctgctgttcctccactgcttgcccatagggctgcctggttgactctccttcccattgtttacagtgaaggtgtcattcacaaaaactcaaggactgctattctccttcttccccttagtttactcctggtttttaccccaccctcaaccctctccagcataaaacctagtgagctaaaggctttgtctgcagaaggagatcaagaggctgggggtaaggccaagaaggtaggaggaaaatggcagacctgggctggagaagaaccttctccgtatcccaggtgtgcctggcagtatggtttcctcttcctctgtgcctgtgcagcattcatcccagctggccttggggttcaggttccttcttccctccctcctgtgaagttacactgtaggacacaagctgtgagcaatctgcagtctactgtccctgtgtgttggcgttcttagcttttttgacaaactcttttctccaggtagtaggacaatgaaaattgttctaagcaaaggaaagaaaactgactttgttgcacttttagtttttttaaaaaaaacaaaaacaaaaacatggc

SEQ ID NO: 7580 - protein, 393 aa, Homo sapiens; identical to SEQ ID NO: 7574

SEQ ID NO: 7581 - DNA, 2733 bp, Homo sapiens
ggcggggccgcgctagtggttccggttcggctccagccgcccctcggctcctcgccttccccctcccgtccgccttctcccctccctcccgctcctgggaaagagagaaaccaccgctgcgggtgggtagagaagcacttggcgcctcggggaggggaccgcgcccgcctcatttgcgccttgcagcactgctggaccaggttacaagatgttcacctaagattgagacctagtgactacatttcctacgggaacaaataaatggtttttcatctcccggagatacattacaaacaaatatggtgctaaaagaactccttacctttctctgactacaatttatttggacatacttttgtattgaagagaggtatacatactgaagctacttgctgtactataggagactctgtcctgtaggatcatggaccatcctagtagggaaaaggatgaaagacaacggacaactaaacccatggcacaaaggagtgcacactgctctcgaccatctggctcctcatcgtcctctggggttcttatggtgggacccaacttcagggttggcaagaagataggatgtgggaacttcggagagctcagattaggtaaaaatctctacaccaatgaatatgtagcaatcaaactggaaccaataaaatcacgtgctccacagcttcatttagagtacagattttataaacagcttggcagtgcaggtgaaggtctcccacaggtgtattactttggaccatgtgggaaatataatgccatggtgctggagctccttggccctagcttggaggacttgtttgacctctgtgaccgaacatttactttgaagacggtgttaatgatagccatccagctgctttctcgaatggaatacgtgcactcaaagaacctcatttaccgagatgtcaagccagagaacttcctgattggtcgacaaggcaataagaaagagcatgttatacacattatagactttggactggccaaggaatacattgaccccgaaaccaaaaaacacataccttatagggaacacaaaagtttaactggaactgcaagatatatgtctatcaacacgcatcttggcaaagagcaaagccggagagatgatttggaagccctaggccatatgttcatgtatttccttcgaggcagcctcccctggcaaggactcaaggctgacacattaaaagagagatatcaaaaaattggtgacaccaaaaggaatactcccattgaagctctctgtgagaactttccagaggagatggcaacctaccttcgatatgtcaggcgactggacttctttgaaaaacctgattatgagtatttacggaccctcttcacagacctctttgaaaagaaaggctacacctttgactatgcctatgattgggttgggagacctattcctactccagtagggtcagttcacgtagattctggtgcatctgcaataactcgagaaagccacacacatagggatcggccatcacaacagcagcctcttcgaaatcagagccttaggactgttacagctgagcattatgatgttaacaactcagccatctggcacaggggaagaggcacctaaacagattcttctggacaaaagtcacatatgagcaagatcagaatagtagcagatgtaaaaagcagaatgtatcatcagagcgccgaggagagtgggaaattcagcccagccggcagaccaatacctcatacctaacgtctcacttggctgcagaccgccatgggggatcagtgcaggtggttagctcaaccaatggagagctgaatgttgatgatcccacgggagcccactccaatgcaccaatcacagctcatgccgaggtggaggtagtggaggaagctaagtgctgctgtttctttaagaggaaaaggaagaagactgctcagcgccacaagtgaccagtgcctcccaggagtcctcaggccctggggactctgactcaattgtacctgcagctcctgccatttctcattggaagggactcctctttgggggagggtggatatccaaaccaaaaagaagaaaacagatgcccccagaaggggccagtgcgggcagccagggcctagtgggtcattggccatctccgcctgcctaaggctctgagcaggtcccagagctgctgttcctccactgcttgcccatagggctgcctggttgactctccttcccattgtttacagtgaaggtgtcattcacaaaaactcaaggactgctattctccttcttccccttagtttactcctggtttttaccccaccctcaaccctctccagcataaaacctagtgagctaaaggctttgtctgcagaaggagatcaagaggctgggggtaaggccaagaaggtaggaggaaaatggcagacctgggctggagaagaaccttctccgtatcccaggtgtgcctggcagtatggtttcctcttcctctgtgcctgtgcagcattcatcccagctggccttggggttcaggttccttcttccctccctcctgtgaagttacactgtaggacacaagctgtgagcaatctgcagtctactgtccctgtgtgttggcgttcttagcttttttgacaaactcttttctccaggtagtaggacaatgaaaattgttctaagcaaaggaaagaaaactgactttgttgcacttttagtttttttaaaaaaaacaaaaacaaaaacatggc

SEQ ID NO: 7582 - protein, 393 aa, Homo sapiens; identical to SEQ ID NO: 7574

SEQ ID NO: 7583 - DNA, 2897 bp, Homo sapiens
gggtccttgtccagtgaaacaccctcggctgggaagtcagttcgttctctcctctcctctcttcttgtttgaacatggtgcggactaaagcagacagtgttccaggcacttacagaaaagtggtggctgctcgagcccccagaaaggtgcttggttcttccacctctgccactaattcgacatcagtttcatcgaggaaagctgaaaataaatatgcaggagggaaccccgtttgcgtgcgcccaactcccaagtggcaaaaaggaattggagaattctttaggttgtcccctaaagattctgaaaaagagaatcagattcctgaagaggcaggaagcagtggcttaggaaaagcaaagagaaagttacaagatgttcacctaagattgagacctagtgactacatttcctacgggaacaaataaatggtttttcatctcccggagatacattacaaacaaatatggtgctaaaagaactccttacctttctctgactacaatttatttggacatacttttgtattgaagagaggtatacatactgaagctacttgctgtactataggagactctgtcctgtaggatcatggaccatcctagtagggaaaaggatgaaagacaacggacaactaaacccatggcacaaaggagtgcacactgctctcgaccatctggctcctcatcgtcctctggggttcttatggtgggacccaacttcagggttggcaagaagataggatgtgggaacttcggagagctcagattaggtaaaaatctctacaccaatgaatatgtagcaatcaaactggaaccaataaaatcacgtgctccacagcttcatttagagtacagattttataaacagcttggcagtgcaggtgaaggtctcccacaggtgtattactttggaccatgtgggaaatataatgccatggtgctggagctccttggccctagcttggaggacttgtttgacctctgtgaccgaacatttactttgaagacggtgttaatgatagccatccagctgctttctcgaatggaatacgtgcactcaaagaacctcatttaccgagatgtcaagccagagaacttcctgattggtcgacaaggcaataagaaagagcatgttatacacattatagactttggactggccaaggaatacattgaccccgaaaccaaaaaacacataccttatagggaacacaaaagtttaactggaactgcaagatatatgtctatcaacacgcatcttggcaaagagcaaagccggagagatgatttggaagccctaggccatatgttcatgtatttccttcgaggcagcctcccctggcaaggactcaaggctgacacattaaaagagagatatcaaaaaattggtgacaccaaaaggaatactcccattgaagctctctgtgagaactttccagaggagatggcaacctaccttcgatatgtcaggcgactggacttctttgaaaaacctgattatgagtatttacggaccctcttcacagacctctttgaaaagaaaggctacacctttgactatgcctatgattgggttgggagacctattcctactccagtagggtcagttcacgtagattctggtgcatctgcaataactcgagaaagccacacacatagggatcggccatcacaacagcagcctcttcgaaatcagagccttaggactgttacagctgagcattatgatgttaacaactcagccatctggcacaggggaagaggcacctaaacagattcttctggacaaaagtcacatatgagcaagatcagaatagtagcagatgtaaaaagcagaatgtatcatcagagcgccgaggagagtgggaaattcagcccagccggcagaccaatacctcatacctaacgtctcacttggctgcagaccgccatgggggatcagtgcaggtggttagctcaaccaatggagagctgaatgttgatgatcccacgggagcccactccaatgcaccaatcacagctcatgccgaggtggaggtagtggaggaagctaagtgctgctgtttctttaagaggaaaaggaagaagactgctcagcgccacaagtgaccagtgcctcccaggagtcctcaggccctggggactctgactcaattgtacctgcagctcctgccatttctcattggaagggactcctctttgggggagggtggatatccaaaccaaaaagaagaaaacagatgcccccagaaggggccagtgcgggcagccagggcctagtgggtcattggccatctccgcctgcctaaggctctgagcaggtcccagagctgctgttcctccactgcttgcccatagggctgcctggttgactctccttcccattgtttacagtgaaggtgtcattcacaaaaactcaaggactgctattctccttcttccccttagtttactcctggtttttaccccaccctcaaccctctccagcataaaacctagtgagctaaaggctttgtctgcagaaggagatcaagaggctgggggtaaggccaagaaggtaggaggaaaatggcagacctgggctggagaagaaccttctccgtatcccaggtgtgcctggcagtatggtttcctcttcctctgtgcctgtgcagcattcatcccagctggccttggggttcaggttccttcttccctccctcctgtgaagttacactgtaggacacaagctgtgagcaatctgcagtctactgtccctgtgtgttggcgttcttagcttttttgacaaactcttttctccaggtagtaggacaatgaaaattgttctaagcaaaggaaagaaaactgactttgttgcacttttagtttttttaaaaaaaacaaaaacaaaaacatggc

SEQ ID NO: 7584 - protein, 393 aa, Homo sapiens; identical to SEQ ID NO: 7574

SEQ ID NO: 7585 - DNA, 1880 bp, Homo sapiens
atccaaggcacgaaccagccatgggcacagaccaagagccaagatgggataaacaagggttgctttatccctggatgacatgagatggacatcaccacattaaaggttcttaagctagagagtaacaggaagtatctgtatgtattcaaggttacaagatgttcacctaagattgagacctagtgactacatttcctacgggaacaaataaatggtttttcatctcccggagatacattacaaacaaatatggtgctaaaagaactccttacctttctctgactacaatttatttggacatacttttgtattgaagagaggtatacatactgaagctacttgctgtactataggagactctgtcctgtaggatcatggaccatcctagtagggaaaaggatgaaagacaacggacaactaaacccatggcacaaaggagtgcacactgctctcgaccatctggctcctcatcgtcctctggggttcttatggtgggacccaacttcagggttggcaagaagataggatgtgggaacttcggagagctcagattagatgcagtgtctcatatgttgcttagctgctctcaaactcctggcctgaaatgatcctcctgccttggcctcctgctaaagtgctggcagtaataggcataagccactgtgactggccaattttcttccaatggatatatttcatttttggtaaaaatctctacaccaatgaatatgtagcaatcaaactggaaccaataaaatcacgtgctccacagcttcatttagagtacagattttataaacagcttggcagtgcaggtgaaggtctcccacaggtgtattactttggaccatgtgggaaatataatgccatggtgctggagctccttggccctagcttggaggacttgtttgacctctgtgaccgaacatttactttgaagacggtgttaatgatagccatccagctgctttctcgaatggaatacgtgcactcaaagaacctcatttaccgagatgtcaagccagagaacttcctgattggtcgacaaggcaataagaaagagcatgttatacacattatagactttggactggccaaggaatacattgaccccgaaaccaaaaaacacataccttatagggaacacaaaagtttaactggaactgcaagatatatgtctatcaacacgcatcttggcaaagagcaaagccggagagatgatttggaagccctaggccatatgttcatgtatttccttcgaggcagcctcccctggcaaggactcaaggctgacacattaaaagagagatatcaaaaaattggtgacaccaaaaggaatactcccattgaagctctctgtgagaactttccagaggagatggcaacctaccttcgatatgtcaggcgactggacttctttgaaaaacctgattatgagtatttacggaccctcttcacagacctctttgaaaagaaaggctacacctttgactatgcctatgattgggttgggagacctattcctactccagtagggtcagttcacgtagattctggtgcatctgcaataactcgagaaagccacacacatagggatcggccatcacaacagcagcctcttcgaaatcagccaaggtctttaacaagcagagtgttttgtccagcagtgaggccccttttcccacttcccagcacccacataaacaggaataatgtgctggaaatgaaaccaggtggcagaagcagctacacatgcaagagaagcctgattgggtccacattaaccagatgacaggagtgagagccttcacttacatttcggggaccatcagtgagaactgggatggcagtgaacctgaaataaagatcgttgaaataag

SEQ ID NO: 7586 - protein, 395 aa, Homo sapiens
MILLPWPPAKVLAVIGISHCDWPIFFQWIYFIFGKNLYTNEYVAIKLEPIKSRAPQLHLEYRFYKQLGSAGEGLPQVYYFGPCGKYNAMVLELLGPSLEDLFDLCDRTFTLKTVLMIAIQLLSRMEYVHSKNLIYRDVKPENFLIGRQGNKKEHVIHIIDFGLAKEYIDPETKKHIPYREHKSLTGTARYMSINTHLGKEQSRRDDLEALGHMFMYFLRGSLPWQGLKADTLKERYQKIGDTKRNTPIEALCENFPEEMATYLRYVRRLDFFEKPDYEYLRTLFTDLFEKKGYTFDYAYDWVGRPIPTPVGSVHVDSGASAITRESHTHRDRPSQQQPLRNQPRSLTSRVFCPAVRPLFPLPSTHINRNNVLEMKPGGRSSYTCKRSLIGSTLTR

SEQ ID NO: 7587 - DNA, 1361 bp, Homo sapiens
ccttgtccagtgaaacaccctcggctgggaagtcagttcgttctctcctctcctctcttcttgtttgaacatggtgcggactaaagcagacagtgttccaggcacttacagaaaagctgaaaataaatatgcaggagggaaccccgtttgcgtgcgcccaactcccaagtggcaaaaaggaattggagaattctttaggttgtcccctaaagattctgaaaaagagaatcagattcctgaagaggcaggaagcagtggcttaggaaaagcaaagagaaaagcatgtcctttgcaacctgatcacacaaatgatgaaaaagaatagaactttctcattcatctttgaataacgtctccttgtttaccctggtattctagaatgtaaatttacataaatgtgtttgttccaattagctttgttgaacaggcatttaattaaaaaatttaggtttaaatttagatgttcaaaagtagttgtgaaatttgagaatttgtaagactaattatggtaacttagcttagtattcaatataatgcattgtttggtttcttttaccaaattaagtgtctagttcttgctaaaatcaagtcattgcattgtgttctaattacaagtatgttgtatttgagatttgcttagattgttgtactgctgccatttttattggtgtttgattattggaatggtgccatattgtcactccttctacttgctttaaaaagcagagttagatttttgcacattaaaaaattcagtattaattaaacattacttattctaccctcttttttggcaaggaggacaaatacgcaatgttggaaaaccttggatggatatcttctctttaaaaaaatgtaaagataatttggtcttgagggtttaaacggttgataatgcctctacaacaacaagaaaaaagataaaatactaggatagaatcatggtgggcacagtggcttctcaggaggctgaggagggaggtttgcttgagtccaggagttggagaccagcccaggcaacatagcgtaaaccctatctctaaaacaatttttagccgggtgcggtggctcacgcctgtaatcccagcactctgggaggccgaggcgggtggatcatgaggtcaggagatcgagaccatcctgcctaacaaggtgaaaccccgtctctactaaaaatacaaaaaattagccgggcgcggtggcgggcgcctgtagtcccagctactcgggaggctgaggcaggagaatggcgtgaacccgggaagtggagcttgcagtgagccgagattgcgccactgcagtcggcagtccggcttgggcgacagagcgagactccgtctcaaaaaaaaaaaaaaaaaaaa

SEQ ID NO: 7588 - protein, 84 aa, Homo sapiens
MVRTKADSVPGTYRKAENKYAGGNPVCVRPTPKWQKGIGEFFRLSPKDSEKENQIPEEAGSSGLGKAKRKACPLQPDHTNDEKE

SEQ ID NO: 7589 - DNA, 1513 bp, Homo sapiens
gggtccttgtccagtgaaacaccctcggctgggaagtcagttcgttctctcctctcctctcttcttgtttgaacatggtgcggactaaagcagacagtgttccaggcacttacagaaaagtggtggctgctcgagcccccagaaaggtgcttggttcttccacctctgccactaattcgacatcagtttcatcgaggaaagctgaaaataaatatgcaggagggaaccccgtttgcgtgcgcccaactcccaagtggcaaaaaggaattggagaattctttaggttgtcccctaaagattctgaaaaagagaatcagattcctgaagaggcaggaagcagtggcttaggaaaagcaaagagaaaccaggagccacccatcctccagcacactgagcagcaagctggacacacggcacactgatccaaatggagcatgtcctttgcaacctgatcacacaaatgatgaaaaagaatagaactttctcattcatctttgaataacgtctccttgtttaccctggtattctagaatgtaaatttacataaatgtgtttgttccaattagctttgttgaacaggcatttaattaaaaaatttaggtttaaatttagatgttcaaaagtagttgtgaaatttgagaatttgtaagactaattatggtaacttagcttagtattcaatataatgcattgtttggtttcttttaccaaattaagtgtctagttcttgctaaaatcaagtcattgcattgtgttctaattacaagtatgttgtatttgagatttgcttagattgttgtactgctgccatttttattggtgtttgattattggaatggtgccatattgtcactccttctacttgctttaaaaagcagagttagatttttgcacattaaaaaattcagtattaattaaacattacttattctaccctcttttttggcaaggaggacaaatacgcaatgttggaaaaccttggatggatatcttctctttaaaaaaatgtaaagataatttggtcttgagggtttaaacggttgataatgcctctacaacaacaagaaaaaagataaaatactaggatagaatcatggtgggcacagtggcttctcaggaggctgaggagggaggtttgcttgagtccaggagttggagaccagcccaggcaacatagcgtaaaccctatctctaaaacaatttttagccgggtgcggtggctcacgcctgtaatcccagcactctgggaggccgaggcgggtggatcatgaggtcaggagatcgagaccatcctgcctaacaaggtgaaaccccgtctctactaaaaatacaaaaaattagccgggcgcggtggcgggcgcctgtagtcccagctactcgggaggctgaggcaggagaatggcgtgaacccgggaagtggagcttgcagtgagccgagattgcgccactgcagtcggcagtccggcttgggcgacagagcgagactccgtctcaaaaaaaaaaaaaaaaaaaa

SEQ ID NO: 7590 - protein, 115 aa, Homo sapiens
MVRTKADSVPGTYRKVVAARAPRKVLGSSTSATNSTSVSSRKAENKYAGGNPVCVRPTPKWQKGIGEFFRLSPKDSEKENQIPEEAGSSGLGKAKRNQEPPILQHTEQQAGHTAH

SEQ ID NO: 7591 - DNA, 1310 bp, Homo sapiens
aatataaactgtggcgggatagttttcgggtccttgtccagtgaaacaccctcggctgggaagtcagttcgttctctcctctcctctcttcttgtttgaacatggtgcggactaaagcagacagtgttccaggcacttacagaaaagtggtggctgctcgagcccccagaaaggtgcttggttcttccacctctgccactaattcgacatcagtttcatcgaggaaagagcatgtcctttgcaacctgatcacacaaatgatgaaaaagaatagaactttctcattcatctttgaataacgtctccttgtttaccctggtattctagaatgtaaatttacataaatgtgtttgttccaattagctttgttgaacaggcatttaattaaaaaatttaggtttaaatttagatgttcaaaagtagttgtgaaatttgagaatttgtaagactaattatggtaacttagcttagtattcaatataatgcattgtttggtttcttttaccaaattaagtgtctagttcttgctaaaatcaagtcattgcattgtgttctaattacaagtatgttgtatttgagatttgcttagattgttgtactgctgccatttttattggtgtttgattattggaatggtgccatattgtcactccttctacttgctttaaaaagcagagttagatttttgcacattaaaaaattcagtattaattaaacattacttattctaccctcttttttggcaaggaggacaaatacgcaatgttggaaaaccttggatggatatcttctctttaaaaaaatgtaaagataatttggtcttgagggtttaaacggttgataatgcctctacaacaacaagaaaaaagataaaatactaggatagaatcatggtgggcacagtggcttctcaggaggctgaggagggaggtttgcttgagtccaggagttggagaccagcccaggcaacatagcgtaaaccctatctctaaaacaatttttagccgggtgcggtggctcacgcctgtaatcccagcactctgggaggccgaggcgggtggatcatgaggtcaggagatcgagaccatcctgcctaacaaggtgaaaccccgtctctactaaaaatacaaaaaattagccgggcgcggtggcgggcgcctgtagtcccagctactcgggaggctgaggcaggagaatggcgtgaacccgggaagtggagcttgcagtgagccgagattgcgccactgcagtcggcagtccggcttgggcgacagagcgagactccgtctcaaaaaaaaaaaaaaaaaaaa

SEQ ID NO: 7592 - protein, 65 aa, Homo sapiens; identical to SEQ ID NO: 1050

SEQ ID NO: 7593 - DNA, 1511 bp, Homo sapiens
ggctcgggagagaccttggagcgcgcgggaaagagaccaatataaactgtggcgggatagttttcgggtccttgtccagtgaaacaccctcggctgggaagtcagttcgttctctcctctcctctcttcttgtttgaacatggtgcggactaaagcagacagtgttccaggcacttacagaaaagtggtggctgctcgagcccccagaaaggtgcttggttcttccacctctgccactaattcgacatcagtttcatcgaggaaagctgaaaataaatatgcaggagggaaccccgtttgcgtgcgcccaactcccaagtggcaaaaaggaattggagaattctttaggttgtcccctaaagattctgaaaaagagaatcagattcctgaagaggcaggaagcagtggcttaggaaaagcaaagagaaaagcatgtcctttgcaacctgatcacacaaatgatgaaaaagaatagaactttctcattcatctttgaataacgtctccttgtttaccctggtattctagaatgtaaatttacataaatgtgtttgttccaattagctttgttgaacaggcatttaattaaaaaatttaggtttaaatttagatgttcaaaagtagttgtgaaatttgagaatttgtaagactaattatggtaacttagcttagtattcaatataatgcattgtttggtttcttttaccaaattaagtgtctagttcttgctaaaatcaagtcattgcattgtgttctaattacaagtatgttgtatttgagatttgcttagattgttgtactgctgccatttttattggtgtttgattattggaatggtgccatattgtcactccttctacttgctttaaaaagcagagttagatttttgcacattaaaaaattcagtattaattaaacattacttattctaccctcttttttggcaaggaggacaaatacgcaatgttggaaaaccttggatggatatcttctctttaaaaaaatgtaaagataatttggtcttgagggtttaaacggttgataatgcctctacaacaacaagaaaaaagataaaatactaggatagaatcatggtgggcacagtggcttctcaggaggctgaggagggaggtttgcttgagtccaggagttggagaccagcccaggcaacatagcgtaaaccctatctctaaaacaatttttagccgggtgcggtggctcacgcctgtaatcccagcactctgggaggccgaggcgggtggatcatgaggtcaggagatcgagaccatcctgcctaacaaggtgaaaccccgtctctactaaaaatacaaaaaattagccgggcgcggtggcgggcgcctgtagtcccagctactcgggaggctgaggcaggagaatggcgtgaacccgggaagtggagcttgcagtgagccgagattgcgccactgcagtcggcagtccggcttgggcgacagagcgagactccgtctcaaaaaaaaaaaaaaaaaaaa

SEQ ID NO: 7594 - protein, 111 aa, Homo sapiens; identical to SEQ ID NO: 1052

SEQ ID NO: 7595 - DNA, 1547 bp, Homo sapiens
ctccggagtcgagctctgtcagtgcatgattcttgccaatcgctaaacgtaggactcgaggaaggccattggcaattctgctaagaagacagtgcaagtgcctataaaaacgacagtttagggggaaaacaaaccaatacccggaaagctgagaggccagctttttaatcgtcatggttttatgtaaaataaaacagcacgtggaaggtattgtaagcgcttggtggctgctcgagcccccagaaaggtgcttggttcttccacctctgccactaattcgacatcagtttcatcgaggaaagctgaaaataaatatgcaggagggaaccccgtttgcgtgcgcccaactcccaagtggcaaaaaggaattggagaattctttaggttgtcccctaaagattctgaaaaagagaatcagattcctgaagaggcaggaagcagtggcttaggaaaagcaaagagaaaagcatgtcctttgcaacctgatcacacaaatgatgaaaaagaatagaactttctcattcatctttgaataacgtctccttgtttaccctggtattctagaatgtaaatttacataaatgtgtttgttccaattagctttgttgaacaggcatttaattaaaaaatttaggtttaaatttagatgttcaaaagtagttgtgaaatttgagaatttgtaagactaattatggtaacttagcttagtattcaatataatgcattgtttggtttcttttaccaaattaagtgtctagttcttgctaaaatcaagtcattgcattgtgttctaattacaagtatgttgtatttgagatttgcttagattgttgtactgctgccatttttattggtgtttgattattggaatggtgccatattgtcactccttctacttgctttaaaaagcagagttagatttttgcacattaaaaaattcagtattaattaaacattacttattctaccctcttttttggcaaggaggacaaatacgcaatgttggaaaaccttggatggatatcttctctttaaaaaaatgtaaagataatttggtcttgagggtttaaacggttgataatgcctctacaacaacaagaaaaaagataaaatactaggatagaatcatggtgggcacagtggcttctcaggaggctgaggagggaggtttgcttgagtccaggagttggagaccagcccaggcaacatagcgtaaaccctatctctaaaacaatttttagccgggtgcggtggctcacgcctgtaatcccagcactctgggaggccgaggcgggtggatcatgaggtcaggagatcgagaccatcctgcctaacaaggtgaaaccccgtctctactaaaaatacaaaaaattagccgggcgcggtggcgggcgcctgtagtcccagctactcgggaggctgaggcaggagaatggcgtgaacccgggaagtggagcttgcagtgagccgagattgcgccactgcagtcggcagtccggcttgggcgacagagcgagactccgtctcaaaaaaaaaaaaaaaaaaaa

SEQ ID NO: 7596 - protein, 91 aa, Homo sapiens
MVLCKIKQHVEGIVSAWWLLEPPERCLVLPPLPLIRHQFHRGKLKINMQEGTPFACAQLPSGKKELENSLGCPLKILKKRIRFLKRQEAVA

SEQ ID NO: 7597 - DNA, 2004 bp, Homo sapiens
cctcttctcataccctgtgctaacaacttttaacaaaaaatttgcatcacttttaagaatcaagaaaaatttctgaaggtcatatgggacagaaaaaaaaaccaagggaaaaatcacgccacttgggaaaaaaagattcgaaatctgcctttttatagatttgtaattaataaggtccaggctttctaagcaacttaaatgttttgtttcgaaacaaagtacttgtctggatgtaggaggaaagggagtgatgtcactgccattatgatgccccttgaatataagaccctacttgctatctcccctgcaccagccaggagccacccatcctccagcacactgagcagcaagctggacacacggcacactgatccaaatgggtaaggggatggtggcgatgctcattctgggtctgctacttctggcgctgctcctacccgtgcaggtttcttcatttgttcctttaaccagtatgccggaagctactgcagccgaaaccacaaagccctccaacagtgccctacagcctacagccggtctccttgtggtcttgcttgcccttctacatctctaccattaagaggcaggtcaagaaacagctacagttctccaacccatacactaaaaccgaatccaaatggtgcctagaagttcaatgtggcaaggaaaaaaaccaggtcttcatcaaatctactaatttcactccttattaacagagaaacgcttgagagtctcaaactggactggtttaaagagcatctgaaggatttgactagatgataaatgccaatattaaatctgttggagtttcacgtataagacagaggagaaagagaacatcaaaaattacttagcaagctatggaatggagattcagttttcattttagtttgttaaatctacaaggctgtaaaatgattagagcatgtcctttgcaacctgatcacacaaatgatgaaaaagaatagaactttctcattcatctttgaataacgtctccttgtttaccctggtattctagaatgtaaatttacataaatgtgtttgttccaattagctttgttgaacaggcatttaattaaaaaatttaggtttaaatttagatgttcaaaagtagttgtgaaatttgagaatttgtaagactaattatggtaacttagcttagtattcaatataatgcattgtttggtttcttttaccaaattaagtgtctagttcttgctaaaatcaagtcattgcattgtgttctaattacaagtatgttgtatttgagatttgcttagattgttgtactgctgccatttttattggtgtttgattattggaatggtgccatattgtcactccttctacttgctttaaaaagcagagttagatttttgcacattaaaaaattcagtattaattaaacattacttattctaccctcttttttggcaaggaggacaaatacgcaatgttggaaaaccttggatggatatcttctctttaaaaaaatgtaaagataatttggtcttgagggtttaaacggttgataatgcctctacaacaacaagaaaaaagataaaatactaggatagaatcatggtgggcacagtggcttctcaggaggctgaggagggaggtttgcttgagtccaggagttggagaccagcccaggcaacatagcgtaaaccctatctctaaaacaatttttagccgggtgcggtggctcacgcctgtaatcccagcactctgggaggccgaggcgggtggatcatgaggtcaggagatcgagaccatcctgcctaacaaggtgaaaccccgtctctactaaaaatacaaaaaattagccgggcgcggtggcgggcgcctgtagtcccagctactcgggaggctgaggcaggagaatggcgtgaacccgggaagtggagcttgcagtgagccgagattgcgccactgcagtcggcagtccggcttgggcgacagagcgagactccgtctcaaaaaaaaaaaaaaaaaaaa

SEQ ID NO: 7598 - protein, 35 aa, Homo sapiens
MEWRFSFHFSLLNLQGCKMIRACPLQPDHTNDEKE

SEQ ID NO: 7599 - DNA, 1443 bp, Homo sapiens
aaggttatcctgctgttctggatcgccaggctctcctctccaagctgctggggtccaggactcggtgtcggaaccctcctgccccttctgaacacccttttttgcctctcttcacagtggtggctgctcgagcccccagaaaggtgcttggttcttccacctctgccactaattcgacatcagtttcatcgaggaaagctgaaaataaatatgcaggagggaaccccgtttgcgtgcgcccaactcccaagtggcaaaaaggaattggagaattctttaggttgtcccctaaagattctgaaaaagagaatcagattcctgaagaggcaggaagcagtggcttaggaaaagcaaagagaaaagcatgtcctttgcaacctgatcacacaaatgatgaaaaagaatagaactttctcattcatctttgaataacgtctccttgtttaccctggtattctagaatgtaaatttacataaatgtgtttgttccaattagctttgttgaacaggcatttaattaaaaaatttaggtttaaatttagatgttcaaaagtagttgtgaaatttgagaatttgtaagactaattatggtaacttagcttagtattcaatataatgcattgtttggtttcttttaccaaattaagtgtctagttcttgctaaaatcaagtcattgcattgtgttctaattacaagtatgttgtatttgagatttgcttagattgttgtactgctgccatttttattggtgtttgattattggaatggtgccatattgtcactccttctacttgctttaaaaagcagagttagatttttgcacattaaaaaattcagtattaattaaacattacttattctaccctcttttttggcaaggaggacaaatacgcaatgttggaaaaccttggatggatatcttctctttaaaaaaatgtaaagataatttggtcttgagggtttaaacggttgataatgcctctacaacaacaagaaaaaagataaaatactaggatagaatcatggtgggcacagtggcttctcaggaggctgaggagggaggtttgcttgagtccaggagttggagaccagcccaggcaacatagcgtaaaccctatctctaaaacaatttttagccgggtgcggtggctcacgcctgtaatcccagcactctgggaggccgaggcgggtggatcatgaggtcaggagatcgagaccatcctgcctaacaaggtgaaaccccgtctctactaaaaatacaaaaaattagccgggcgcggtggcgggcgcctgtagtcccagctactcgggaggctgaggcaggagaatggcgtgaacccgggaagtggagcttgcagtgagccgagattgcgccactgcagtcggcagtccggcttgggcgacagagcgagactccgtctcaaaaaaaaaaaaaaaaaaaa

SEQ ID NO: 7600 - protein, 44 aa, Homo sapiens
MQEGTPFACAQLPSGKKELENSLGCPLKILKKRIRFLKRQEAVA

SEQ ID NO: 7601 - DNA, 1414 bp, Homo sapiens
cctcttctcataccctgtgctaacaacttttaacaaaaaatttgcatcacttttaagaatcaagaaaaatttctgaaggtcatatgggacagaaaaaaaaaccaagggaaaaatcacgccacttgggaaaaaaagattcgaaatctgcctttttatagatttgtaattaataaggtccaggctttctaagcaacttaaatgttttgtttcgaaacaaagtacttgtctggatgtaggaggaaagggagtgatgtcactgccattatgatgccccttgaatataagaccctacttgctatctcccctgcaccagccaggagccacccatcctccagcacactgagcagcaagctggacacacggcacactgatccaaatgggtaaggggatggtggcgatgctcattctgggtctgctacttctggcgctgctcctacccgtgcaggtttcttcatttgttcctttaaccagtatgccggaagctactgcagccgaaaccacaaagccctccaacagtgccctacagcctacagccggtctccttgtggtcttgcttgcccttctacatctctaccattaagaggcaggtcaagaaacagctacagttctccaacccatacactaaaaccgaatccaaatggtgcctagaagttcaatgtggcaaggaaaaaaaccaggtcttcatcaaatctactaatttcactccttattaacagagaaacgcttgagagtctcaaactggactggtttaaagagcatctgaaggatttgactagatgataaatgccaatattaaatctgttggagtttcacgtataagacagaggagaaagagaacatcaaaaattacttagcaagctatggaatggagattcagttttcattttagtttgttaaatctacaaggctgtaaaatgattagagcatgtcctttgcaacctgatcacacaaatgatgaaaaagaatagaactttctcattcatctttgaataacgtctccttgtttaccctggtattctagaatgtaaatttacataaatgtgtttgttccaattagctttgttgaacaggcatttaattaaaaaatttaggtttaaatttagatgttcaaaagtagttgtgaaatttgagaatttgtaagactaattatggtaacttagcttagtattcaatataatgcattgtttggtttcttttaccaaattaagtgtctagttcttgctaaaatcaagtcattgcattgtgttctaattacaagtatgttgtatttgagatttgcttagattgttgtactgctgccatttttattggtgtttgattattggaatggtgccatattgtcactccttctacttgctttaaaaagcagagttagatttttgcacattaaaaaattcagtattaattaaacatt

SEQ ID NO: 7602 - protein, 35 aa, Homo sapiens; identical to SEQ ID NO: 7598

SEQ ID NO: 7603 - DNA, 853 bp, Homo sapiens
aaggttatcctgctgttctggatcgccaggctctcctctccaagctgctggggtccaggactcggtgtcggaaccctcctgccccttctgaacacccttttttgcctctcttcacagtggtggctgctcgagcccccagaaaggtgcttggttcttccacctctgccactaattcgacatcagtttcatcgaggaaagctgaaaataaatatgcaggagggaaccccgtttgcgtgcgcccaactcccaagtggcaaaaaggaattggagaattctttaggttgtcccctaaagattctgaaaaagagaatcagattcctgaagaggcaggaagcagtggcttaggaaaagcaaagagaaaagcatgtcctttgcaacctgatcacacaaatgatgaaaaagaatagaactttctcattcatctttgaataacgtctccttgtttaccctggtattctagaatgtaaatttacataaatgtgtttgttccaattagctttgttgaacaggcatttaattaaaaaatttaggtttaaatttagatgttcaaaagtagttgtgaaatttgagaatttgtaagactaattatggtaacttagcttagtattcaatataatgcattgtttggtttcttttaccaaattaagtgtctagttcttgctaaaatcaagtcattgcattgtgttctaattacaagtatgttgtatttgagatttgcttagattgttgtactgctgccatttttattggtgtttgattattggaatggtgccatattgtcactccttctacttgctttaaaaagcagagttagatttttgcacattaaaaaattcagtattaattaaacatt

SEQ ID NO: 7604 - protein, 44 aa, Homo sapiens; identical to SEQ ID NO: 7600

SEQ ID NO: 7605 - DNA, 771 bp, Homo sapiens
ccttgtccagtgaaacaccctcggctgggaagtcagttcgttctctcctctcctctcttcttgtttgaacatggtgcggactaaagcagacagtgttccaggcacttacagaaaagctgaaaataaatatgcaggagggaaccccgtttgcgtgcgcccaactcccaagtggcaaaaaggaattggagaattctttaggttgtcccctaaagattctgaaaaagagaatcagattcctgaagaggcaggaagcagtggcttaggaaaagcaaagagaaaagcatgtcctttgcaacctgatcacacaaatgatgaaaaagaatagaactttctcattcatctttgaataacgtctccttgtttaccctggtattctagaatgtaaatttacataaatgtgtttgttccaattagctttgttgaacaggcatttaattaaaaaatttaggtttaaatttagatgttcaaaagtagttgtgaaatttgagaatttgtaagactaattatggtaacttagcttagtattcaatataatgcattgtttggtttcttttaccaaattaagtgtctagttcttgctaaaatcaagtcattgcattgtgttctaattacaagtatgttgtatttgagatttgcttagattgttgtactgctgccatttttattggtgtttgattattggaatggtgccatattgtcactccttctacttgctttaaaaagcagagttagatttttgcacattaaaaaattcagtattaattaaacatt

SEQ ID NO: 7606 - protein, 84 aa, Homo sapiens; identical to SEQ ID NO: 7588

SEQ ID NO: 7607 - DNA, 923 bp, Homo sapiens
gggtccttgtccagtgaaacaccctcggctgggaagtcagttcgttctctcctctcctctcttcttgtttgaacatggtgcggactaaagcagacagtgttccaggcacttacagaaaagtggtggctgctcgagcccccagaaaggtgcttggttcttccacctctgccactaattcgacatcagtttcatcgaggaaagctgaaaataaatatgcaggagggaaccccgtttgcgtgcgcccaactcccaagtggcaaaaaggaattggagaattctttaggttgtcccctaaagattctgaaaaagagaatcagattcctgaagaggcaggaagcagtggcttaggaaaagcaaagagaaaccaggagccacccatcctccagcacactgagcagcaagctggacacacggcacactgatccaaatggagcatgtcctttgcaacctgatcacacaaatgatgaaaaagaatagaactttctcattcatctttgaataacgtctccttgtttaccctggtattctagaatgtaaatttacataaatgtgtttgttccaattagctttgttgaacaggcatttaattaaaaaatttaggtttaaatttagatgttcaaaagtagttgtgaaatttgagaatttgtaagactaattatggtaacttagcttagtattcaatataatgcattgtttggtttcttttaccaaattaagtgtctagttcttgctaaaatcaagtcattgcattgtgttctaattacaagtatgttgtatttgagatttgcttagattgttgtactgctgccatttttattggtgtttgattattggaatggtgccatattgtcactccttctacttgctttaaaaagcagagttagatttttgcacattaaaaaattcagtattaattaaacatt

SEQ ID NO: 7608 - protein, 115 aa, Homo sapiens; identical to SEQ ID NO: 7590

SEQ ID NO: 7609 - DNA, 720 bp, Homo sapiens
aatataaactgtggcgggatagttttcgggtccttgtccagtgaaacaccctcggctgggaagtcagttcgttctctcctctcctctcttcttgtttgaacatggtgcggactaaagcagacagtgttccaggcacttacagaaaagtggtggctgctcgagcccccagaaaggtgcttggttcttccacctctgccactaattcgacatcagtttcatcgaggaaagagcatgtcctttgcaacctgatcacacaaatgatgaaaaagaatagaactttctcattcatctttgaataacgtctccttgtttaccctggtattctagaatgtaaatttacataaatgtgtttgttccaattagctttgttgaacaggcatttaattaaaaaatttaggtttaaatttagatgttcaaaagtagttgtgaaatttgagaatttgtaagactaattatggtaacttagcttagtattcaatataatgcattgtttggtttcttttaccaaattaagtgtctagttcttgctaaaatcaagtcattgcattgtgttctaattacaagtatgttgtatttgagatttgcttagattgttgtactgctgccatttttattggtgtttgattattggaatggtgccatattgtcactccttctacttgctttaaaaagcagagttagatttttgcacattaaaaaattcagtattaattaaacatt

SEQ ID NO: 7610 - protein, 65 aa, Homo sapiens; identical to SEQ ID NO: 1050

SEQ ID NO: 7611 - DNA, 921 bp, Homo sapiens
ggctcgggagagaccttggagcgcgcgggaaagagaccaatataaactgtggcgggatagttttcgggtccttgtccagtgaaacaccctcggctgggaagtcagttcgttctctcctctcctctcttcttgtttgaacatggtgcggactaaagcagacagtgttccaggcacttacagaaaagtggtggctgctcgagcccccagaaaggtgcttggttcttccacctctgccactaattcgacatcagtttcatcgaggaaagctgaaaataaatatgcaggagggaaccccgtttgcgtgcgcccaactcccaagtggcaaaaaggaattggagaattctttaggttgtcccctaaagattctgaaaaagagaatcagattcctgaagaggcaggaagcagtggcttaggaaaagcaaagagaaaagcatgtcctttgcaacctgatcacacaaatgatgaaaaagaatagaactttctcattcatctttgaataacgtctccttgtttaccctggtattctagaatgtaaatttacataaatgtgtttgttccaattagctttgttgaacaggcatttaattaaaaaatttaggtttaaatttagatgttcaaaagtagttgtgaaatttgagaatttgtaagactaattatggtaacttagcttagtattcaatataatgcattgtttggtttcttttaccaaattaagtgtctagttcttgctaaaatcaagtcattgcattgtgttctaattacaagtatgttgtatttgagatttgcttagattgttgtactgctgccatttttattggtgtttgattattggaatggtgccatattgtcactccttctacttgctttaaaaagcagagttagatttttgcacattaaaaaattcagtattaattaaacatt

SEQ ID NO: 7612 - protein, 111 aa, Homo sapiens; identical to SEQ ID NO: 1052

SEQ ID NO: 7613 - DNA, 957 bp, Homo sapiens
ctccggagtcgagctctgtcagtgcatgattcttgccaatcgctaaacgtaggactcgaggaaggccattggcaattctgctaagaagacagtgcaagtgcctataaaaacgacagtttagggggaaaacaaaccaatacccggaaagctgagaggccagctttttaatcgtcatggttttatgtaaaataaaacagcacgtggaaggtattgtaagcgcttggtggctgctcgagcccccagaaaggtgcttggttcttccacctctgccactaattcgacatcagtttcatcgaggaaagctgaaaataaatatgcaggagggaaccccgtttgcgtgcgcccaactcccaagtggcaaaaaggaattggagaattctttaggttgtcccctaaagattctgaaaaagagaatcagattcctgaagaggcaggaagcagtggcttaggaaaagcaaagagaaaagcatgtcctttgcaacctgatcacacaaatgatgaaaaagaatagaactttctcattcatctttgaataacgtctccttgtttaccctggtattctagaatgtaaatttacataaatgtgtttgttccaattagctttgttgaacaggcatttaattaaaaaatttaggtttaaatttagatgttcaaaagtagttgtgaaatttgagaatttgtaagactaattatggtaacttagcttagtattcaatataatgcattgtttggtttcttttaccaaattaagtgtctagttcttgctaaaatcaagtcattgcattgtgttctaattacaagtatgttgtatttgagatttgcttagattgttgtactgctgccatttttattggtgtttgattattggaatggtgccatattgtcactccttctacttgctttaaaaagcagagttagatttttgcacattaaaaaattcagtattaattaaacatt

SEQ ID NO: 7614 - protein, 91 aa, Homo sapiens; identical to SEQ ID NO: 7596

SEQ ID NO: 7615 - DNA, 309 bp, Homo sapiens
agtagctacatttgggacactttctataattagtcaatatttttagatagagcctgggcctaagcataagtggacttgattctggtaagtaaaacttttacaactgccttgatgtatagaagcctttttagaaatatgcactccagcctgggcaacagagcgataatccgtctgaaaaaaaaaaaaagaaatacgtactccatgaggccaggcatgcctagcactttgggagactgaagggggaggattgcttgagcccaggagtttgagaccagcttaggcatggtctctacacaaaaaaaaaaaaaa

SEQ ID NO: 7616 - protein, 41 aa, Homo sapiens [sequence omitted]

SEQ ID NO: 7617 - DNA, 1671 bp, Homo sapiens
accacgcctggctaattttgttgtatttttagtagagatgggatttcaccgtgttagccaggattgtctcaatctgacctcatgatctgcccgcctcggcctcccaaagtgctgggattacaggcgagtgcaaccacacccggccacaaactttttaagaagttaatgaaaccataccttttacatttttaatgacaggaaaatgctcacaataattgttaacccaaaattctggatacaaaagtacaatctttactgtgtaaatacatgtatatgtactatatgaaaatataccaaatatcaataatacttatctctgggtaaaaacctcttctcataccctgtgctaacaacttttaacaaaaaatttgcatcacttttaagaatcaagaaaaatttctgaaggtcatatgggacagaaaaaaaaaccaagggaaaaatcacgccacttgggaaaaaaagattcgaaatctgcctttttatagatttgtaattaataaggtccaggctttctaagcaacttaaatgttttgtttcgaaacaaagtacttgtctggatgtaggaggaaagggagtgatgtcactgccattatgatgccccttgaatataagaccctacttgctatctcccctgcaccagccaggagccacccatcctccagcacactgagcagcaagctggacacacggcacactgatccaaatgggtaaggggatggtggcgatgctcattctgggtctgctacttctggcgctgctcctacccgtgcaggtttcttcatttgttcctttaaccagtatgccggaagctactgcagccgaaaccacaaagccctccaacagtgccctacagcctacagccggtctccttgtggtcttgcttgcccttctacatctctaccattaagaggcaggtcaagaaacagctacagttctccaacccatacactaaaaccgaatccaaatggtgcctagaagttcaatgtggcaaggaaaaaaaccaggtcttcatcaaatctactaatttcactccttattaacagagaaacgcttgagagtctcaaactggactggtttaaagagcatctgaaggatttgactagatgataaatgcctgtactcccagtactttgggaggcctaggccggcggatcacctgaggtcaggagtttgagactaacctggccaaaatggtgaaaccccatctgtactaaaaatacaaatattaactgggcgtggtggtgagtgcctgtaatcccagctactcaggtggctgaagcaggacaatcacttgaactcaggaggcagaggttgcagtgagctgagatcgcgctactgcactctagcctagcctgggcaacagagtgagacttcgtctcaaaaaaaaaaaagccaagtgcagtggctcacgcctgtaatcccagcactttgggaggccgaggtgggcggatcacgaggtcaggagatcaagaccatcctggctaatacagtgaaaccctgtctctactaaaaatacaaaaaattagccggggatggtggcaggcacctggagtcccagctactcgggaggctgaggcaggagaatagcgtgaactcaggaggcggagcttgcagtgagccgagattgcgctactgcactccagcctgggcgacagcgcgagactccgtctc

SEQ ID NO: 7618 - protein, 67 aa, Homo sapiens
MGKGMVAMLILGLLLLALLLPVQVSSFVPLTSMPEATAAETTKPSNSALQPTAGLLVVLLALLHLYH

SEQ ID NO: 7619 - DNA, 593 bp, Homo sapiens
gggtccttgtccagtgaaacaccctcggctgggaagtcagttcgttctctcctctcctctcttcttgtttgaacatggtgcggactaaagcagacagtgttccaggcacttacagaaaagtggtggctgctcgagcccccagaaaggtgcttggttcttccacctctgccactaattcgacatcagtttcatcgaggaaagctgaaaataaatatgcaggagggaaccccgtttgcgtgcgcccaactcccaagtggcaaaaaggaattggagaattctttaggttgtcccctaaagattctgaaaaagagaatcagattcctgaagaggcaggaagcagtggcttaggaaaagcaaagagaaaccaggagccacccatcctccagcacactgagcagcaagctggacacacggcacactgatccaaatgggtaaggggatggtggcgatgctcattctgggtctgctacttctggcgctgctcctacccgtgcaggtttcttcatttgttcctttaaccagtatgccggaagctactgcagccgaaaccggcacttaactctttagggctttggatttgatttgccattgca

SEQ ID NO: 7620 - protein, 115 aa, Homo sapiens; identical to SEQ ID NO: 7590

SEQ ID NO: 7621 - DNA, 1440 bp, Homo sapiens
gggtccttgtccagtgaaacaccctcggctgggaagtcagttcgttctctcctctcctctcttcttgtttgaacatggtgcggactaaagcagacagtgttccaggcacttacagaaaagtggtggctgctcgagcccccagaaaggtgcttggttcttccacctctgccactaattcgacatcagtttcatcgaggaaagctgaaaataaatatgcaggagggaaccccgtttgcgtgcgcccaactcccaagtggcaaaaaggaattggagaattctttaggttgtcccctaaagattctgaaaaagagaatcagattcctgaagaggcaggaagcagtggcttaggaaaagcaaagagaaaccaggagccacccatcctccagcacactgagcagcaagctggacacacggcacactgatccaaatgggtaaggggatggtggcgatgctcattctgggtctgctacttctggcgctgctcctacccgtgcaggtttcttcatttgttcctttaaccagtatgccggaagctactgcagccgaaaccacaaagccctccaacagtgccctacagcctacagccggtctccttgtggtcttgcttgcccttctacatctctaccattaagaggcaggtcaagaaacagctacagttctccaacccatacactaaaaccgaatccaaatggtgcctagaagttcaatgtggcaaggaaaaaaaccaggtcttcatcaaatctactaatttcactccttattaacagagaaacgcttgagagtctcaaactggactggtttaaagagcatctgaaggatttgactagatgataaatgccaatattaaatctgttggagtttcacgtataagacagaggagaaagagaacatcaaaaattacttagcaagctatggaatggagattcagttttcattttagtttgttaaatctacaaggctgtaaaatgattaggtaatagaaaaagcttccatgattctatttattatatatgtgcattggaagaaactaccaggtgttactataaatattctatgtattgtttcagccatcctaatttaatgctgatatgctctagatttacattgctaagttttcactcttctcttgggcacttaactctgtttcttttgtttgtttgttttgagaaggagtctcactcttgcccaggctggcgtgcagtggtgctatcttggctcactgcaaccttcgcctcctgggttcaagcgatttttgtgcctttcttgagtaactgggattacaggcacgtgccaccacatccagctaatttttgtatttttagtagagatgggattcaccatgttggccaggatggtcttgatctcctgaccttgtgatctgcccgcctcggcctcccaaagtgctgggattacaggcatgagccactgcgcctggccaag

SEQ ID NO: 7622 - protein, 115 aa, Homo sapiens; identical to SEQ ID NO: 7590

SEQ ID NO: 7623 - DNA, 406 bp, Homo sapiens
ctcggctgggaagtcagttcgttctctcctctcctctcttcttgtttgaacatggtgcggactaaagcagacagtgttccaggcacttacagaaaagtggtggctgctcgagcccccagaaaggtgcttggttcttccacctctgccactaattcgacatcagtttcatcgaggaaagagatggggtttcatcacattgcccaggctggtctcgaactcctgggctgaagcaatcctcccgcctcagcctaccaaagtgctgggattacagacgtgagccaccacgcctggcctgatgaaatttcattagagccgcatctcatcgtctggtccactgttgaatcaccagagccaactaaataggcccttactgaatatatgttgaataaatgcatcctttaaggca

SEQ ID NO: 7624 - protein, 58 aa, Homo sapiens
MVRTKADSVPGTYRKVVAARAPRKVLGSSTSATNSTSVSSRKEMGFHHIAQAGLELLG

SEQ ID NO: 7625 - DNA, 782 bp, Homo sapiens
gtctacttccttgtgccctccggagtcgagctctgtcagtgcatgattcttgccaatcgctaaacgtaggactcgaggaaggccattggcaattctgctaagaagacagtgcaagtgcctataaaaacgacagtttagggggaaaacaaaccaatacccggaaagctgagaggccagctttttaatcgtcatggttttatgtaaaataaaacagcacgtggaaggtattgtaagcgctagacggagactcgccctgtcgcccaggctggagtgcagtagcgtgatctcggctcactgcaacctccgcctcccgggttcaaggaattctcctgcctcagcctccagagtagctgggactacaggcacatgccgccactcccagctaattttttattttttatttttatttttattttagtagagactgggtttcaccatgttgcccacgctggtctcgaactcctgagctcaggcaatctgcctgcctcggcctcccaaagtgctaggattacaggtgtgagccaccatgcctgaccgattctgttttatgtatggtatttagagagtgaaaatcactccccaggggtgttgtgagtaattagaaggtaagcataaagatagaaaaaaattatgaccctttatcctagagttatgctcactgtgtgacagcgatgtggtcttaccacatttggcagggtcttttcgtttcgtttcgtttcatttcatttccttgccttgccttgcctttcttttcttttttcttttcttttctttctttcttt

SEQ ID NO: 7626 - protein, 75 aa, Homo sapiens
MVLCKIKQHVEGIVSARRRLALSPRLECSSVISAHCNLRLPGSRNSPASASRVAGTTGTCRHSQLIFYFLFLFLF

SEQ ID NO: 7627 - DNA, 865 bp, Homo sapiens
ggaactagtccggtgcaggacgtggggcttttgcagctcagctggttccggctggggaagatggcggtggctggggcggtgtccggggagccgctggtgcactggtgcacccagcagttgcggaagactttcggcctggatgtcagcgaggagatcattcagtacgttttgtcaattgagagtgctgaagagatacgagaatatgttactgatctcctccagggaaatgaaggcaaaaaaggtcaattcatagaagaacttataaccaaatggcaaaagaatgatcaggagttgatttcggatcctttgcagcagtgcttcaaaaaagatgaaattttagatgggcagaaatcaggcgaccatctaaagcggggtaggaagaaagggagaaacagacaggaagttcctgcatttactgaacctgacacgactgcagaggttaaaacaccttttgatttggccaaggcacaagagaacagcaactccgtaaagaagaagacaaagtttgtcaatttatacacaagagagggacaggacaggcttgcagtcctgctccctggtcgtcacccttgtgattgcctgggccagaagcacaagctcatcaataactgtctgatctgtgggcgcattgtctgtgaacaagaaggctcaggcccttgcttattctgtggcactctggtgtgtactcatgaggaacaagatattttacagcgtgactcaaacaagagccagaaactgctaaagaaactcatgtcagacggagtttcactctttttgcccaggctggagtgcaatggtgtgatctcggctcaccgcagccttcgcctcccaggttcaagcgattcttctgcctcagcctccccag

SEQ ID NO: 7628 - protein, 267 aa, Homo sapiens
MAVAGAVSGEPLVHWCTQQLRKTFGLDVSEEIIQYVLSIESAEEIREYVTDLLQGNEGKKGQFIEELITKWQKNDQELISDPLQQCFKKDEILDGQKSGDHLKRGRKKGRNRQEVPAFTEPDTTAEVKTPFDLAKAQENSNSVKKKTKFVNLYTREGQDRLAVLLPGRHPCDCLGQKHKLINNCLICGRIVCEQEGSGPCLFCGTLVCTHEEQDILQRDSNKSQKLLKKLMSDGVSLFLPRLECNGVISAHRSLRLPGSSDSSASAS

SEQ ID NO: 7629 - DNA, 2045 bp, Homo sapiens
ggaactagtccggtgcaggacgtggggcttttgcagctcagctggttccggctggggaagatggcggtggctggggcggtgtccggggagccgctggtgcactggtgcacccagcagttgcggaagactttcggcctggatgtcagcgaggagatcattcagtacgttttgtcaattgagagtgctgaagagatacgagaatatgttactgatctcctccagggaaatgaaggcaaaaaaggtcaattcatagaagaacttataaccaaatggcaaaagaatgatcaggagttgatttcggatcctttgcagcagtgcttcaaaaaagatgaaattttagatgggcagaaatcaggcgaccatctaaagcggggtaggaagaaagggagaaacagacaggaagttcctgcatttactgaacctgacacgactgcagaggttaaaacaccttttgatttggccaaggcacaagagaacagcaactccgtaaagaagaagacaaagtttgtcaatttatacacaagagagggacaggacaggcttgcagtcctgctccctggtcgtcacccttgtgattgcctgggccagaagcacaagctcatcaataactgtctgatctgtgggcgcattgtctgtgaacaagaaggctcaggcccttgcttattctgtggcactctggtgtgtactcatgaggaacaagatattttacagcgtgactcaaacaagagccagaaactgctaaagaaactcatgtcaggagtggagaattctggaaaggtggacatctctaccaaggaccttcttcctcatcaagaattgcgaattaagtctggtctggagaaggctatcaagcataaagacaaactgttagagtttgacagaactagtattcgaaggacccaagtcattgatgatgagtcagattactttgccagtgattctaaccaatggttgtccaaacttgagcgggaaaccttgcagaagcgagaggaggagctgagagaacttcgacacgcctctcgactttctaagaaggtcaccattgactttgcaggaaggaagatcctggaagaagaaaattcactagcagagtatcatagcagactagatgagacaatacaggccattgccaatggaaccttgaaccagccactgaccaaattggatagatcttctgaagagcctttgggagttctggtaaatcccaacatgtaccagtcccctccccagtgggttgaccacacaggtgcagcctcacagaagaaggctttccgttcttcaggatttggactagagttcaactcatttcagcaccagttgcgaatccaggatcaagaatttcaggaaggctttgatggtggctggtgcctctctgtacatcagccctgggcttctctgcttgtcagagggattaaaagggtggagggcagatcctggtacaccccccacagaggacgactttggatagcagccacagctaaaaaaccctcccctcaagaagtctcagaactccaggctacatatcgtcttcttcgtgggaaagatgtggaatttcctaatgactatccgtcaggttgtcttctgggctgtgtggacctaattgactgcttgtcccagaagcaatttaaggagcagtttccagacatcagtcaagagtctgattctccatttgttttcatctgcaaaaatcctcaggaaatggttgtgaagtttcctattaaaggaaatccaaaaatctggaaattggattccaagatccatcaaggagcaaagaaggggttaatgaagcagaataaagctgtctgacccaggagaaaaggaactatacagcatagtggagttttgtgtactaaaattgctatctactggtcctttggaattgaagtagtagaaacctaaaggcttggcgtcaggcttgaatatctcagaacttaaactcttaccaaaatctgtatatttttcttaaggagtgggattcctactttatgtaatggggtcgaaatctttgaacacattatttataaaaacctgtttaaaaattctaa

SEQ ID NO: 7630 - protein, 581 aa, Homo sapiens; identical to SEQ ID NO: 1054

SEQ ID NO: 7631 - DNA, 590 bp, Homo sapiens
ggaaatcatattgggaacatttttcttagaaaaatatatcccaggccgggcatcgtggctcacgcctgtaatcccagcactttgagaggccaaggcgggtggatcacttgaggtcaggagttctaggccagtctggctaacatggtgaaaccccatctctactaaaactacaaaaattagctgggcgtggtggcaggtgcctataatcccagctactcatgaggcagaggcaggagaatcatttgaacccaggaggtggaggttgcaatgagccaagattgtgccactgcactccagcctgggcaagagagactctgtctcagaacaacaacaacaacaacaacaaatgaaaaataatcccatctttgtagagcaacgataccatgtcctccaaaattaaaatttaaaaataaaggcaattagcatgatgatatttggggttatcttttttaaaaaattaataatttataaagctgaacacagtgaagcatgcctgtagcttcactagttactcaggaggtgaggcaggaggatcacttgagcccataagttcaaggccagcctgggcaacatggtgaggtcctgtgtct

SEQ ID NO: 7632 - protein, 43 aa, Homo sapiens
MRQRQENHLNPGGGGCNEPRLCHCTPAWARETLSQNNNNNNNK

SEQ ID NO: 7633 - DNA, 492 bp, Homo sapiens
caaggagatctctgaatctcctgactcttggttgtttgtgataaaagagcattccgttctgattcttctgggaggatttcagtttccagacatcagtcaagagtctgattctccatttgttttcatctgcaaaaatcctcaggaaatggttgtgaagtttcctattaaaggaaatccaaaaatctggaaattggattccaagatccatcaaggagcaaagaaggggttaatgaagcagaataaagctgtctgacccaggagaaaaggaactatacagcatagtggagttttgtgtactaaaattgctatctactggtcctttggaattgaagtagtagaaacctaaaggcttggcgtcaggcttgaatatctcagaacttaaactcttaccaaaatctgtatatttttcttaaggagtgggattcctactttatgtaatggggtcgaaatctttgaacacattatttataaaaacctgtttaaaaattctaa

SEQ ID NO: 7634 - protein, 35 aa, Homo sapiens
MVVKFPIKGNPKIWKLDSKIHQGAKKGLMKQNKAV

SEQ ID NO: 7635 - DNA, 802 bp, Homo sapiens
aggaaccttagcttgtgagaaggaagttgtacctggaaggatttgccatctatcaataagaagtaactttgtaaattcagtcaaggatctaataatctattatatctgaaatctgggagctaaattggactgattatggaggttagttggatatttttccacttttgactagtcagtagaaattccactttgaattaacttcttgggactgagtacaagttgagttgcccacagtgttttgttcggaaaataaaattatgttgttatttatttatttttgacagggtcttacccagccttgacctagtgggttcacctcagccttccaagtagctgggactacaaaagtgtgccaccatgcttggttaatttttgtaattttttttgtagagatgatggtttgccatgttgctcaggctagtcttgagctcctaggctcaagccatcctcctgcttcagcctcccaaagtggtgggattacaggtttgagccactgcacccagccaattacgttatttttaatgctgaaaatgcacgttgatgacatttgccgaagtatgacgaacaagggggtatctctgaaataccctcctaaaagagacgagaaatgaaaagctggttggtaagtgtttcaggaactttcagattgagagtaatgttaggaagtatttgctttcaagcagttttttttttctttttgagatgaagtcgctctgttgcccaggctggagtgcgttgcagtgagctgagattgcccccctgtactctagcctgggtgacagagcaaaattgtgtctttaaa

SEQ ID NO: 7636 - protein, 72 aa, Homo sapiens
MMVCHVAQASLELLGSSHPPASASQSGGITGLSHCTQPITLFLMLKMHVDDICRSMTNKGVSLKYPPKRDEK

SEQ ID NO: 7637 - DNA, 8192 bp, Homo sapiens
atgtccttgagcagtggagcctccggagggaaaggagtggatgcaaacccggttgagacatacgacagtggggatgaatgggacattggagtagggaatctcatcattgacctggacgccgatctggaaaaggaccagcagaaactggaaatgtcaggctcaaaggaggtggggataccggctcccaatgctgtggccacactaccagacaacatcaagtttgtgaccccagtgccaggtcctcaagggaaggaaggcaaatcaaaatccaaaaggagtaagagtggcaaagacactagcaaacccactccagggacttccctgttcactccaagtgagggggcagctagcaagaaagaggtgcaggggcgctcaggagatggtgccaatgctggaggcctggttgctgctattgctcccaagggctcagagaaggcggctaaggcatcccgcagtgtagccggttccaaaaaggagaaggagaacagctcatctaagagcaagaaggagagaagcgaaggagtggggacttgttcagaaaaggatcctggggtcctccagccagttcccttgggaggacggggtggtcagtatgatggaagtgcaggggtggatacaggagctgtggagccacttgggagtatagctattgagcctggggcagcgctcaatcctttgggaactaaaccggagccagaggaaggggagaatgagtgtcgcctgctaaagaaagtcaagtctgaaaagatggagtcccctgtttccacaccagcagtgctgccaatacaccttttggtgccagtggtcaacaatgacatctcatctccctgtgagcagatcatggttcgtacccgatcagttggggtcaacacatgtgatgtggctctggccacagagcctgagtgcttgggcccctgtgaacctggaactagcgtcaaccttgaaggcatcgtgtggcaggaaacagaagatgggatgttggtggtaaatgtaacgtggaggaacaagacatatgtaggtacactccttgactgcacacgacatgattgggcacccccaaggttctgtgactccccgaccagtgacctggaaatgcgcaatggccggggtagaggcaaacgcatgcgtcccaacagtaatacacctgtcaatgagacagccacagcctctgacagcaaagggaccagtaacagcagcaaaacccgggcaggagccaatagcaaaggccgtcggggcagccagaattcttcagagcaccgcccacctgccagcagcacttctgaggatgtcaaggccagcccttcctcagctaataagcggaaaaacaaacccctttcagacatggagctgaattctagctcagaggactccaaagggagcaagcgtgtccgtactaattccatgggctcagccactggcccccttcctgggacaaaggtagaacccactgttctggacagaaactgcccctcccccgtcctaattgactgtccccacccaaactgcaacaagaagtacaagcacatcaatggacttaagtaccaccaagctcatgcccatacagatgatgacagcaagccggaagcggatggggacagtgagtacggagaggaacctattctccatgcagatcttgggagctgcaacggtgcatctgtctcacaaaaaggttccttgtcccctgcccgctcagctacccccaaagttcgacttgtagagccccatagcccttctccttcaagcaaattcagcacaaaaggcctctgtaagaaaaagttgagtggggaaggggacacagaccttggggccttatccaatgatggctctgatgatggaccctcagtgatggatgaaacaagcaatgatgcctttgattctttagaaaggaagtgtatggaaaaagaaaaatgtaaaaaaccctctagtttaaaacctgaaaagattccttccaagagcctaaagtcagcccgtcccattgcccctgccatccccccacagcaaatctacaccttccagacagccaccttcacagcagcgagcccaggctcttcctcaggcttgaccgccacagtggcacaagccatgcccaacagtccccaactcaagcccattcagcccaagcccactgttatgggagaacctttcacagtcaaccctgccttgactccagccaaggacaagaaaaagaaagacaaaaaaaagaaggaatcttcaaaggaacttgaaagtcctctgacccctgggaaggtgtgtcgagcagaggaaggcaaaagcccattcagggaatcttcaggagatgggatgaaaatggaggggctcctaaatggctcatcagacccccaccaaagccgactggctagcatcaaggctgaagccgacaagatctacagtttcacggacaatgcccccagcccttccattggaggcagtagccgccttgaaaacactacccctactcagcccctgactcccttacatgtggtgacccagaatggagctgaagccagctcagtcaaaaccaacagccctgcatactctgacatctctgatgctggggaggatggggagggcaaggtagacagtgtcaaatcaaaggacgccgaacagttggttaaagaaggggctaagaaaactctttttccccctcagcctcagagcaaagactcaccatattaccaaggctttgagagttactattctccaagttatgcacagtccagccctggggctctgaaccccagcagccaggcaggagtggagagccaggccctgaagacaaaaagggatgaggaacctgagagcatagaagggaaagtgaagaacgatatctgtgaagaaaagaagcccgagctgagcagttccagtcagcagccctcggtcatccagcagcgtcccaatatgtacatgcagtccctgtactacaaccagtatgcctatgtacccccctatggctacagcgaccagagttaccacacccaccttctgagcactaacacggcttaccggcagcagtacgaagaacagcagaaacgccagagcttagagcagcagcagcggggagtggacaagaaggcagagatgggcctgaaggagcgggaggcagcactcaaggaagagtggaagcaaaagccgtcaattccaccaactctcaccaaggcccccagcctgacagacctggtgaaatcaggacctggcaaggccaaggagccaggggctgacccagccaaatcagtcatcattcccaagttagatgactcttcaaaactcccgggccaggcccctgaaggccttaaagtgaagctgagtgatgccagccacctaagcaaggaggcctctgaggccaagacaggtgctgagtgtggtcgacaggcagagatggatccaatactctggtaccgacaggaggcagagccccggatgtggacatatgtttatcctgccaagtactcagacatcaagtcagaggatgagcggtggaaggaggagcgggaccgcaaattgaaggaggaaaggagtcggagtaaggactctgtccccaaggaagatgggaaggaaagcacaagtagtgactgcaagctgcccacgtcagaggagtctcgccttgggagcaaggagccccggccaagtgtccatgtgcctgtgtcctccccacttacccagcaccagtcctacatcccctacatgcacggctattcctacagtcagtcctacgaccccaaccaccccagctaccggagcatgcctgctgtgatgatgcagaactacccaggttcctacctgccttccagctactctttttccccatatggcagcaaggtctcaggtggtgaagatgctgacaaggcacgagccagccccagtgtgacttgtaaatccagctcagagtccaaagccctggacatcttgcagcagcatgccagtcactacaagagcaagtctcccacgataagtgataaaacttctcaggagagagatcgaggaggctgtggggtggttgggggtggtggcagctgtagcagcgtcgggggagcaagtgggggtgaacggagtgttgaccggccccgcacctctccttcccagcgcctgatgtccacacaccaccaccaccaccacttggggtactcattgctcccagcacagtacaacttaccctatgcagcagggctttcttctacagccattgttgccagccaacaaggctcaactccctcactctacccaccccccaggaggtgagaatgacaccaagtgcccggataaagtcagcttcacgggcccggactggcttacccaaggaggtgctgaaggtgccgtttagacatcagttaaatggtgttgatcatcctgtttgccgtttccaccatgactgaaggcagacccttggctatctcacctccaccagacctccggactacctgaccctacctcttcctcaggagctggagagctggtacttagcaaaaatatttattctctcagccacagttatgactattgtggcctctgtggagatgaaggcacgggaagcaaccaggggaacatggcctcagcccagagaagccactgctctgttccccaagcccttggtctgctgctggagcagtaccagcccccccgcccaccagggagggacccccacccccaagcactgggtaaggtctgaagacagcacagcagccatacccctcaccatcattaccaccatcaccagattctgcatctccctagtgctttgcaccctgggaattggcagcatgtggaggaactagaatctcaggaaagaaattgggggttgttttctacataattgtgaaaacaaggtcttcaaatgtggagacttctccccatttacatgagcacatataaacgctcacaacctagcctggaaaggaagaccaaggcatctgccccaacatggccttgagctgcctgtgaggcagggggcaggggttccaacaccagcacagggctccccagggacactgggagcaagctggtgctggagcatgaatgacgtctgtgaagtagaacctgcgtccccactaagtcctgctgcttcttattccccaactccttgcccttttcccttccctcctaaccccttggtgcctttcccagggggatccccacactggtcttgcctcttcttttccactgcttggctcttaagcctcaggcagataaactagtattccccccagcttggggaaccttggagtctgccaggtcaccttagggcaaggcccagaaggcagcccctgggagcacccagcagttcttggagatgtcctgtcatctagccatctgatatcttcctcatttgaggccacagatatatacagcccaattcctctgtctacaagtacatgattttatatagctcagtctataacctccatgtgggccaatataagctgtgtttcttggtaacacatattttgtttgaggggccactggccatgggaggttatttgttccttagaccctggaataacacatccaagccattacttattagagtctcagaatgtactcagtggagctgtgctttgaggcagccaacatttctctgctctccttagaaatgcagtctcccaatggaagctttatactctttgtactgggaaagtgaggatgatttggtagctttattggggtcatgtcttccccaaggtgtggggagcttagcttacttggcttttgaggtatcatccctctgttctcccctcctatctttccatgaccctctggattgagagagagagataaagactgacagacaccagtgtaggctggaaaagggagtgtgtgaccagagtgccaaaagtgactaggagcaggaacttggctccgactcagtttggaaaatgggaaataggggacagtaagcacaatgcccagtagtagttgatttccaaggaccctggaaccctacacttgagaggcttagggtcaccatctgctcaagaggatcccctctgatctacaggccttttccctaggtttctgcctcctcgtttttgttcaagttgggttctgagtcctccccaaaaaccattgttttagacctcttggcagggccccaaaacagcctccctcatacccatcattccctctgccttctgctgccctcatgggcagtgctctgagcagtgacctccctttcctccgtggaagtagctagtgcagacaccgtcatcccaccccacctgagtcaccccaaccaagagggtgactgaatttcagcctgattatgccctcctggggctcctgtgaggtggagccaaggttccctctctgttcctgtttgtttttaaatattgttgtgtgttttgtatctgtggcactggcctgcagcatactctgtatatattgtaaagaaaccgttaggagtaattttcttttgcattgggcaggcatggccctgcattcctgccctttccactcattctgtaacacagaggacgaacttctgtattagctgggcagccttgggttctccagaagagaacaggtttttcttttcctttttaatttttcttcttaaacatttggctctttgatcctcatatccaagtctcccctgaagagtaggagctgctcagaagagcaggtgaaagccaccatggcagatcctgatgcctgccgggcctagtcttccctctgaaataacatgaagcagcagctgtggagattcttgacaagtgctgagtgaaagatttgctgcccacctctacatggggaggagaaacacaggtgggagctacctgtggcatccatgacctagtcagagggatgagatgctcagcaggggtccccatcctatcccaccccacaaacaaaggctggaaaaatttgctaccaagggccaagaccaccagaccaagcctgtttatgagccacccctgcccaggccctcacagacattgctcacggggcttcccatagaggagaagctaaagagggagggggcctcatccccagatagatcaggcaaggcttggagagctgctctttaggatccacatcaactacttcctcattttaaggtatggcagttcccttcatccccttttcctgccttgtacatgtacatgtatgaaatttccttctcttaccgaactctctccacacatcacaaggtcaaagaaccacacgcttagaagggtaagagggcaccctatgaaatgaaatggtgatttcttgagtctcttttttccacgtttaaggggccatggcaggacttagagttgcgagttaagactgcagagggctagagaattatttcatacaggctttgaggccacccatgtcacttatcccgtataccctctcaccatccccttgtctactctgatgcccccaagatgcaactgggcagctagttggccccataattctgggcctttgttgtttgttttaattacttgggcatcccaggaagctttccagtgatctcctaccatgggcccccctcctgggatcaagcccctcccaggccctgtccccagcccctcctgccccagcccacccgcttgccttggtgctcagccctcccattgggagcaggttggggcgagctggaggcccgggctggaggggcagtgttgctgttcatagattttgttccattggcgttgctctgttgaatttaatttcagtcttcctgattcttcccttctgtaaagtgtacattaccaagttccttgtttttttatatatatatataaatatatatatatacaaactgtactctttttgcctttgtacattcaggcaagaagagaaaataaatctttttaagagacaatcacaaatctgtgagggctgctggttatttctcctggagtttgctgctgagctgcctcttccttcctcccaattttcctgttctccctcagctctcctgatcttcctggccctgctccatatgcatcctcagcttcactttccctggctgatggcaagctgttgaatccagtgtccagactacctgccttgtaacccttttctgcccagcattgttttctggcttggccactggcttagcccaggagctttactctgtgccctggcctcccctctcttcacctttagatttccattcaccgaagtggctttggacccctgggtactctgggacctgtttcctggaggccctggcttgggacactcacctgtgaaactatgca

SEQ ID NO: 7638 - protein, 1411 aa, Homo sapiens; identical to SEQ ID NO: 1056

SEQ ID NO: 7639 - DNA, 8192 bp, Homo sapiens; identical to SEQ ID NO: 7637

SEQ ID NO: 7640 - protein, 1411 aa, Homo sapiens; identical to SEQ ID NO: 1056

SEQ ID NO: 7641 - DNA, 433 bp, Homo sapiens
ggagatgtgaaagagggaataccctccttcatgaaacttccagtttattctggtagggaaacactataaaaatagctcttttgcctgagataagtgttacaaaggaaaattactcctgattgtctatggatgtggtgtctccaggttaatttttctgaaaatgagtgtggatagcagagtctctaaagaagttatcaggccaggcgggcggatcacgaggtcagaagattgagaccacggtgaaacccccgtctctactaaaaatacaaaaaaaaaaaacaaaaattagccgggcgtggtggcgggcacctgtagtcccagctacttggaggctgaggcaggagaatggcatgaacccaggaggcggagcttgcagtgagccaagattgccctactgcactccagcctgcgtaacagagcgacactctgtcta

SEQ ID NO: 7642 - DNA, 1270 bp, Homo sapiens
agagacagagtctcactctgccgcccaggctggagtgcagtggtgtgatctgggctcactgcaacctctgcctcctgggttcaagcgattctcctgcttcagcctcctgagtagctgggattacagtgcgtcaccatgcccggctaatttttgtatttttagtggagatggtgtttctccatgttgaccaggctagtctcaaactcctgacttcaggtgattcacccgcctcagcttcccaaagtgctgggattacaggcacgagccatcatgccccgccatcagttcaattaaatctagatatcacattcttcctatccttttttattatacatgtcatgatatgggatgttggtggtaaatgtaacgtggaggaacaagacatatgtaggtacactccttgactgcacacgacatgattgggcacccccaaggttctgtgactccccgaccagtgacctggaaatgcgcaatggccggggtagaggcaaacgcatgcgtcccaacagtaatacacctgtcaatgagacagccacagcctctgacagcaaagggaccagtaacagcagcaaaacccgggcaggagccaatagcaaaggccgtcggggcagccagaattcttcagagcaccgcccacctgccagcagcacttctgaggatgtcaaggccagcccttcctcagctaataagcggaaaaacaaacccctttcagacatggagctgaattctagctcagaggactccaaagggagcaagcgtgtccgtactaattccatgggctcagccactggcccccttcctgggacaaaggtagaacccactgttctggacagaaactgcccctcccccgtcctaattgactgtccccacccaaactgcaacaagaagtacaagcacatcaatggacttaagtaccaccaagctcatgcccatacagatgatgacagcaagccggaagcggatggggacagtgagtacggagaggaacctattctccatgcagatcttgggagctgcaacggtgcatctgtctcacaaaaaggttccttgtcccctgcccgctcagctacccccaaagttcgacttgtagagccccatagcccttctccttcaagcaaattcagcacaaaaggcctctgtaagaaaaagttgagtggggaaggggacacagaccttggggccttatccaatgatggctctgatgatggaccctcagtgatggatgaaacaagcaatgatgcctttgattctttagaaaggaagtgtatgg

SEQ ID NO: 7643 - protein, 306 aa, Homo sapiens
MLVVNVTWRNKTYVGTLLDCTRHDWAPPRFCDSPTSDLEMRNGRGRGKRMRPNSNTPVNETATASDSKGTSNSSKTRAGANSKGRRGSQNSSEHRPPASSTSEDVKASPSSANKRKNKPLSDMELNSSSEDSKGSKRVRTNSMGSATGPLPGTKVEPTVLDRNCPSPVLIDCPHPNCNKKYKHINGLKYHQAHAHTDDDSKPEADGDSEYGEEPILHADLGSCNGASVSQKGSLSPARSATPKVRLVEPHSPSPSSKFSTKGLCKKKLSGEGDTDLGALSNDGSDDGPSVMDETSNDAFDSLERKC

SEQ ID NO: 7644 - DNA, 643 bp, Homo sapiens
aagtgcactgtgattaacagttttacttacaggaattcatcttacagacatatttgtgtaggtaaaatgaagcatttgtacaagattattcattgcagtttatttgtaatagcagaagattgaaacaacctaaatgtccgttcaaatgctgccattgaaaagaatgaagtagttctctgtctacacatatggaatgatccaaaatatttgggtacatgaaaaaagcagtgtgcagaacattgtgtgtatattgctatcatttaaggaagaatatatgaacatatttgcatatatacatataaaatatctgtggaagacttttggatgtttccaagtaggggaactggaagactgaagaacagttatggaagggacacttcattttatattagggtttgttggagattttttttggttgaggtgtggggactaccttttgaattttggagtaaggctacattacctagtcaaaagaaaaaaaaaaaaaaaaaaaaaaattaattaaaaaaaaataaagtgttcagcgggtgctcacttcagtggtacatatactaaaattggaccaatacagagaagattagcatggcccctgcacaagggtgacatgcagattcgttaagtgttttatatttttaaaattagg

SEQ ID NO: 7645 - protein, 58 aa, Homo sapiens [sequence omitted]

SEQ ID NO: 7646 - DNA, 1334 bp, Homo sapiens
ccttcctcagctaataagcggaaaaacaaacccctttcagacatggagctgaattctagctcagaggactccaaagggagcaagcgtgtccgtactaattccatgggctcagccactggcccccttcctgggacaaaggtagaacccactgttctggacagaaactgcccctcccccgtcctaattgactgtccccacccaaactgcaacaagaagtacaagcacatcaatggacttaagtaccaccaagctcatgcccatacagatgatgacagcaagccggaagcggatggggacagtgagtacggagaggaacctattctccatgcagatcttgggagctgcaacggtgcatctgtctcacaaaaaggttccttgtcccctgcccgctcagctacccccaaagttcgacttgtagagccccatagcccttctccttcaagcaaattcagcacaaaaggcctctgtaagaaaaagttgagtggggaaggggacacagaccttggggccttatccaatgatggctctgatgatggaccctcagtgatggatgaaacaagcaatgatgcctttgattctttagaaaggaagtgtatggaaaaagaaaaatgtaaaaaaccctctagtttaaaacctgaaaagattccttccaagagcctaaagtcagcccgtcccattgcccctgccatccccccacagcaaatgaacttgaaagtcctctgacccctgggaaggtgtgtcgagcagaggaaggcaaaagcccattcagggaatcttcaggagatgggatgaaaatggaggggctcctaaatggctcatcagacccccaccaaagccgactggctagcatcaaggctgaagccgacaagatctacagtttcacggacaatgcccccagcccttccattggaggcagtagccgccttgaaaacactacccctactcagcccctgactcccttacatgtggtgacccagaatggagctgaagccagctcagtcaaaaccaacagccctgcatactctgacatctctgatgctggggaggatggggagggcaaggtagacagtgtcaaatcaaaggacgccgaacagttggttaaagaaggggctaagaaaactctttttccccctcagcctcagagcaaagactcaccatattaccaaggctttgagagttactattctccaagttatgcacagtccagccctggggctctgaaccccagcagccaggcaggagtggagagccaggccctgaagacaaaaagggatgaggaacctgagagcatagaagggaaagtgaagaacgatatctgtgaagaaaagaagccc

SEQ ID NO: 7647 - protein, 226 aa, Homo sapiens
MELNSSSEDSKGSKRVRTNSMGSATGPLPGTKVEPTVLDRNCPSPVLIDCPHPNCNKKYKHINGLKYHQAHAHTDDDSKPEADGDSEYGEEPILHADLGSCNGASVSQKGSLSPARSATPKVRLVEPHSPSPSSKFSTKGLCKKKLSGEGDTDLGALSNDGSDDGPSVMDETSNDAFDSLERKCMEKEKCKKPSSLKPEKIPSKSLKSARPIAPAIPPQQMNLKVL

SEQ ID NO: 7648 - DNA, 398 bp, Homo sapiens
taggggatgtaggactggtgctgggtaagtggggaggacacaggcacatggacacttggccggggctccttgctcccaaggcgagactcctctgacgtgggcagcttgcagtcactacttgtgctttccttcccatcttccttggggacagagtccttactccgactcctttcctcatccctttttgtcttcagggcctggctctccactcctgcctggctgctggggttcagagccccagggctggactgtgcataacttggagaatagtaactctcaaagccttggtaatatggtgagtctttgctctgaggctgagggggaaaaagagttttcttagccccttctttaaccaactgttcggcgtcctttgatttgacactgtctaccttgccctc

SEQ ID NO: 7649 - protein, 81 aa, Homo sapiens
DWCWVSGEDTGTWTLGRGSLLPRRDSSDVGSLQSLLVLSFPSSLGTESLLRLLSSSLFVFRAWLSTPAWLLGFRAPGLDCA

SEQ ID NO: 7650 - DNA, 1886 bp, Homo sapiens
ctgtaacacagaggacgaacttctgtattagctgggcagccttgggttctccagaagagaacaggtttttcttttcctttttaatttttcttcttaaacatttggctctttgatcctcatatccaagtctcccctgaagagtaggagctgctcagaagagcaggtgaaagccaccatggcagatcctgatgcctgccgggcctagtcttccctctgaaataacatgaagcagcagctgtggagattcttgacaagtgctgagtgaaagatttgctgcccacctctacatggggaggagaaacacaggtgggagctacctgtggcatccatgacctagtcagagggatgagatgctcagcaggggtccccatcctatcccaccccacaaacaaaggctggaaaaatttgctaccaagggccaagaccaccagaccaagcctgtttatgagccacccctgcccaggccctcacagacattgctcacggggcttcccatagaggagaagctaaagagggagggggcctcatccccagatagatcaggcaaggcttggagagctgctctttaggatccacatcaactacttcctcattttaaggtatggcagttcccttcatccccttttcctgccttgtacatgtacatgtatgaaatttccttctcttaccgaactctctttgttgtttgttttaattacttgggcatcccaggaagctttccagtgatctcctaccatgggcccccctcctgggatcaagcccctcccaggccctgtccccagcccctcctgccccagcccacccgcttgccttggtgctcagccctcccattgggagcaggttggggcgagctggaggcccgggctggaggggcagtgttgctgttcatagattttgttccattggcgttgctctgttgaatttaatttcagtcttcctgattcttcccttctgtaaagtgtacattaccaagttccttgtttttttatatatatatataaatatatatatatacaaactgtactctttttgcctttgtacattcaggcaagaagagaaaataaatctttttaagagacaatcacaaatctgtgagggctgctggttatttctcctggagtttgctgctgagctgcctcttccttcctcccaattttcctgttctccctcagctctcctgatcttcctggccctgctccatatgcatcctcagcttcactttccctggctgatggcaagctgttgaatccagtgtccagactacctgccttgtaacccttttctgcccagcattgttttctggcttggccactggcttagcccaggagctttactctgtgccctggcctcccctctcttcacctttagatttccattcaccgaagtggctttggacccctgggtactctgggacctgtttcctggaggccctggcttgggacactcacctgtgaaactatgcagctgggagctctctgcctaagagtttgcactatttaaacctgcctgggagttaggacggatggttttaggaatgaccggaaaactacccctaaaactcccccgacattccagcctctagaatgctctgatccagagctcagtggatgattcccagctggtggactcctgtggctaccccatcagaacaagggctaagggtttatgggtcaagagtatttgatcagaattttaaagggtggtatactctgaaacacagcccaaccaaaccattgtttggccgctttctcttttcctctaccttcctcatccccacttttttccctttctctctacttcctcttcttaattggctttggaattgaaatatatttttaaattatttgttgtatttattgaataaagtttttaatgtccctgttctt

SEQ ID NO: 7651 - protein, 93 aa, Homo sapiens
MYMYEISFSYRTLFVVCFNYLGIPGSFPVISYHGPPSWDQAPPRPCPQPLLPQPTRLPWCSALPLGAGWGELEARAGGAVLLFIDFVPLALLC

SEQ ID NO: 7652 - DNA, 2283 bp, Homo sapiens
ctgtaacacagaggacgaacttctgtattagctgggcagccttgggttctccagaagagaacaggtttttcttttcctttttaatttttcttcttaaacatttggctctttgatcctcatatccaagtctcccctgaagagtaggagctgctcagaagagcaggtgaaagccaccatggcagatcctgatgcctgccgggcctagtcttccctctgaaataacatgaagcagcagctgtggagattcttgacaagtgctgagtgaaagatttgctgcccacctctacatggggaggagaaacacaggtgggagctacctgtggcatccatgacctagtcagagggatgagatgctcagcaggggtccccatcctatcccaccccacaaacaaaggctggaaaaatttgctaccaagggccaagaccaccagaccaagcctgtttatgagccacccctgcccaggccctcacagacattgctcacggggcttcccatagaggagaagctaaagagggagggggcctcatccccagatagatcaggcaaggcttggagagctgctctttaggatccacatcaactacttcctcattttaaggtatggcagttcccttcatccccttttcctgccttgtacatgtacatgtatgaaatttccttctcttaccgaactctctttgttgtttgttttaattacttgggcatcccaggaagctttccagtgatctcctaccatgggcccccctcctgggatcaagcccctcccaggccctgtccccagcccctcctgccccagcccacccgcttgccttggtgctcagccctcccattgggagcaggttggggcgagctggaggcccgggctggaggggcagtgttgctgttcatagattttgttccattggcgttgctctgttgaatttaatttcagtcttcctgattcttcccttctgtaaagtgtacattaccaagttccttgtttttttatatatatatataaatatatatatatacaaactgtactctttttgcctttgtacattcaggcaagaagagaaaataaatctttttaagagacaatcacaaatctgtgagggctgctggttatttctcctggagtttgctgctgagctgcctcttccttcctcccaattttcctgttctccctcagctctcctgatcttcctggccctgctccatatgcatcctcagcttcactttccctggctgatggcaagctgttgaatccagtgtccagactacctgccttgtaacccttttctgcccagcattgttttctggcttggccactggcttagcccaggagctttactctgtgccctggcctcccctctcttcacctttagatttccattcaccgaagtggctttggacccctgggtactctgggacctgtttcctggaggccctggcttgggacactcacctgtgaaactatgcagctgggagctctctgcctaagagtttgcactatttaaacctgcctgggagttaggacggatggttttaggaatgaccggaaaactacccctaaaactcccccgacattccagcctctagaatgctctgatccagagctcagtggatgattcccagctggtggactcctgtggctaccccatcagaacaagggctaagggtttatgggtcaagagtatttgatcagaattttaaagggtggtatactctgaaacacagcccaaccaaaccattgtttggccgctttctcttttcctctaccttcctcatccccacttttttccctttctctctacttcctcttcttaattggctttggaattgaaatatatttttaaattatttgttgtatttattgaataaagtttttaatgtccctgttcttaaatttagacttagtttgcctttcacacaccacccccacccccaaaatattctaccttctaagttgctttttaaactgtagtgcagccttttgggtaccatatttctttcctgtcagtggtcttcaatagcaaaagttttttttgaaaagggaaatcttgactgggtgatttttttttgaagagggaaatcttgactgggtttccaatttagcctttgtgactctagccgtattgaagaggaatcaccaataggtggcagcagaatctcaagcatgtttcttgggaaaaagtaagggactgagttttgtcttggttctttttcatctgtcttgtcgattccttgtgtttgtttaatatctgcatcctaaactgccagctgcctctaggaattacctg

SEQ ID NO: 7653 - protein, 93 aa, Homo sapiens; identical to SEQ ID NO: 7651

SEQ ID NO: 7654 - DNA, 909 bp, Homo sapiens
ctgaagagtaggagctgctcagaagagcaggtgaaagccaccatggcagatcctgatgcctgccgggcctcatccccagatagatcaggcaaggcttggagagctgctctttaggatccacatcaactacttcctcattttaaggtatggcagttcccttcatccccttttcctgccttgtacatgtacatgtatgaaatttccttctcttaccgaactctctccacacatcacaaggtcaaagaaccacacgcttagaagggtaagagggcaccctatgaaatgaaatggtgatttcttgagtctcttttttccacgtttaaggggccatggcaggacttagagttgcgagttaagactgcagagggctagagaattatttcatacaggctttgaggccacccatgtcacttatcccgtataccctctcaccatccccttgtctactctgatgcccccaagatgcaactgggcagctagttggccccataattctgggcctttgttgtttgttttaattacttgggcatcccaggaagctttccagtgatctcctaccatgggcccccctcctgggatcaagcccctcccaggccctgtccccagcccctcctgccccagcccacccgcttgccttggtgctcagccctcccattgggagcaggttggggcgagctggaggcccgggctggaggggcagtgttgctgttcatagattttgttccattggcgttgctctgttgaatttaatttcagtcttcctgattcttcccttctgtaaagtgtacattaccaagttccttgtttttttatatatatatataaatatatatatatacaaactgtactctttttgcctttgtacattcaggcaagaagagaaaataaatctttttaagagacaatcac

SEQ ID NO: 7655 - protein, 76 aa, Homo sapiens [sequence omitted]

SEQ ID NO: 7656 - DNA, 1710 bp, Homo sapiens
ctgaagagtaggagctgctcagaagagcaggtgaaagccaccatggcagatcctgatgcctgccgggcctcatccccagatagatcaggcaaggcttggagagctgctctttaggatccacatcaactacttcctcattttaaggtatggcagttcccttcatccccttttcctgccttgtacatgtacatgtatgaaatttccttctcttaccgaactctctccacacatcacaaggtcaaagaaccacacgcttagaagggtaagagggcaccctatgaaatgaaatggtgatttcttgagtctcttttttccacgtttaaggggccatggcaggacttagagttgcgagttaagactgcagagggctagagaattatttcatacaggctttgaggccacccatgtcacttatcccgtataccctctcaccatccccttgtctactctgatgcccccaagatgcaactgggcagctagttggccccataattctgggcctttgttgtttgttttaattacttgggcatcccaggaagctttccagtgatctcctaccatgggcccccctcctgggatcaagcccctcccaggccctgtccccagcccctcctgccccagcccacccgcttgccttggtgctcagccctcccattgggagcaggttggggcgagctggaggcccgggctggaggggcagtgttgctgttcatagattttgttccattggcgttgctctgttgaatttaatttcagtcttcctgattcttcccttctgtaaagtgtacattaccaagttccttgtttttttatatatatatataaatatatatatatacaaactgtactctttttgcctttgtacattcaggcaagaagagaaaataaatctttttaagagacaatcacaaatctgtgagggctgctggttatttctcctggagtttgctgctgagctgcctcttccttcctcccaattttcctgttctccctcagctctcctgatcttcctggccctgctccatatgcatcctcagcttcactttccctggctgatggcaagctgttgaatccagtgtccagactacctgccttgtaacccttttctgcccagcattgttttctggcttggccactggcttagcccaggagctttactctgtgccctggcctcccctctcttcacctttagatttccattcaccgaagtggctttggacccctgggtactctgggacctgtttcctggaggccctggcttgggacactcacctgtgaaactatgcagctgggagctctctgcctaagagtttgcactatttaaacctgcctgggagttaggacggatggttttaggaatgaccggaaaactacccctaaaactcccccgacattccagcctctagaatgctctgatccagagctcagtggatgattcccagctggtggactcctgtggctaccccatcagaacaagggctaagggtttatgggtcaagagtatttgatcagaattttaaagggtggtatactctgaaacacagcccaaccaaaccattgtttggccgctttctcttttcctctaccttcctcatccccacttttttccctttctctctacttcctcttcttaattggctttggaattgaaatatatttttaaattatttgttgtatttattgaataaagtttttaatgtccctgttctt

SEQ ID NO: 7657 - protein, 76 aa, Homo sapiens [sequence omitted]

SEQ ID NO: 7658 - DNA, 2107 bp, Homo sapiens
ctgaagagtaggagctgctcagaagagcaggtgaaagccaccatggcagatcctgatgcctgccgggcctcatccccagatagatcaggcaaggcttggagagctgctctttaggatccacatcaactacttcctcattttaaggtatggcagttcccttcatccccttttcctgccttgtacatgtacatgtatgaaatttccttctcttaccgaactctctccacacatcacaaggtcaaagaaccacacgcttagaagggtaagagggcaccctatgaaatgaaatggtgatttcttgagtctcttttttccacgtttaaggggccatggcaggacttagagttgcgagttaagactgcagagggctagagaattatttcatacaggctttgaggccacccatgtcacttatcccgtataccctctcaccatccccttgtctactctgatgcccccaagatgcaactgggcagctagttggccccataattctgggcctttgttgtttgttttaattacttgggcatcccaggaagctttccagtgatctcctaccatgggcccccctcctgggatcaagcccctcccaggccctgtccccagcccctcctgccccagcccacccgcttgccttggtgctcagccctcccattgggagcaggttggggcgagctggaggcccgggctggaggggcagtgttgctgttcatagattttgttccattggcgttgctctgttgaatttaatttcagtcttcctgattcttcccttctgtaaagtgtacattaccaagttccttgtttttttatatatatatataaatatatatatatacaaactgtactctttttgcctttgtacattcaggcaagaagagaaaataaatctttttaagagacaatcacaaatctgtgagggctgctggttatttctcctggagtttgctgctgagctgcctcttccttcctcccaattttcctgttctccctcagctctcctgatcttcctggccctgctccatatgcatcctcagcttcactttccctggctgatggcaagctgttgaatccagtgtccagactacctgccttgtaacccttttctgcccagcattgttttctggcttggccactggcttagcccaggagctttactctgtgccctggcctcccctctcttcacctttagatttccattcaccgaagtggctttggacccctgggtactctgggacctgtttcctggaggccctggcttgggacactcacctgtgaaactatgcagctgggagctctctgcctaagagtttgcactatttaaacctgcctgggagttaggacggatggttttaggaatgaccggaaaactacccctaaaactcccccgacattccagcctctagaatgctctgatccagagctcagtggatgattcccagctggtggactcctgtggctaccccatcagaacaagggctaagggtttatgggtcaagagtatttgatcagaattttaaagggtggtatactctgaaacacagcccaaccaaaccattgtttggccgctttctcttttcctctaccttcctcatccccacttttttccctttctctctacttcctcttcttaattggctttggaattgaaatatatttttaaattatttgttgtatttattgaataaagtttttaatgtccctgttcttaaatttagacttagtttgcctttcacacaccacccccacccccaaaatattctaccttctaagttgctttttaaactgtagtgcagccttttgggtaccatatttctttcctgtcagtggtcttcaatagcaaaagttttttttgaaaagggaaatcttgactgggtgatttttttttgaagagggaaatcttgactgggtttccaatttagcctttgtgactctagccgtattgaagaggaatcaccaataggtggcagcagaatctcaagcatgtttcttgggaaaaagtaagggactgagttttgtcttggttctttttcatctgtcttgtcgattccttgtgtttgtttaatatctgcatcctaaactgccagctgcctctaggaattacctg

SEQ ID NO: 7659 - protein, 76 aa, Homo sapiens [sequence omitted]

SEQ ID NO: 7660 - DNA, 7105 bp, Homo sapiens
caaagtgctgggattacagggatgagccaccatgcccagcctgtttcttaaatcatcctttaggtggttgagattaaacaatgcctgccctcaagtggtgtgaccaggaggtgaggaaggattggaaaaagctggggataggagccagttagaaacaagactaaactgaatatgaaacccaacctggtttggatcttatgataggaagacttgtgtttagaagtcactgtctgttgtgcttaaattcttccaggattcattattcctaatgagcttggtggcgtagcttcaataccatttgaacactaaagccattatcagaagagaaggccattactgggtaatttcatgccccttaatgtctttaactaccacatacgtacccatcccccttcctttctcacttcagaaatgacaggttttttggaagagaagcaatttgccattcacagcaagtaactaataacagatgctttatgtggacgatgaagataattattgtgatctactgtctactaaacttatcgcaaaccccagctgtttcttttagggaactggaactagttcccagagtgggggcttgaaacacccctccacccccactcacacacacacttgcttatctgcgcagatttatgggggaggagcagagagcctccaggatccttgtatgtgagaatggggaagtaaatgacatgttaccatggcgtagatatcttgcgtttatttgaagaggagagagatcaggaaaccagaaatatcacaagccccactgctaaatatgactagcttaaagaaagaaatatcacaagctcatagattagtgctggacacagggcaggcaggctccagggattacttctaggaagacaaagggtattatggtctaaaaaaaaatcctcactttattcttgtcttttcagtgagttggcccattgcttctgctgtttgcaagtaaaaattagctaagaatcaagatggtagttgggatgcagggcagaggttgaatgcagctcgctcatctaaagaccatttgaggaataattcctttggaagtaggagcctggcaccagaattctagaattgcaagggcttggtgattgatagggttattttgtgaacctaattaattctctgtatacaagatgataatctgtctatcccagaggggtttgccccatctttgggtagctccactgaccaatagaagcaaaccagctttctcccgtggtccagccctccttatgcccctgcaggaacctcagcacagagaagtgatcattggggaatgagaacggaatcatatgatgtggtgcatgtgtgtgcatttgcttggggaaactcccctcaccaaactcttgtcttattttttctagtctggacactgttattctgccccttaacacattggaagggggaatcacaatagctcattgtccccagcagaaaataactcctgtccttgaaaacagtagcatagtcctctgttaagccctttctgtttttttgtttgtttttgtttttttgagacagagttttgctcttgttgctccggctggagtgcagtggcgtggtcttggctcactgcaacctccacctcccgggttcaagcgattctcctgcttcggcctccttagtagttgggactacaggcacgctccaccacacccggctaatttttgtgttttcagtagagacggggtttcaccatgttggccaagctggtctcaaactcctgacctcaggtgatccatccactttggcctcccaaactgctgggattacaggcgtgagccaccacgcctggccgtttttgttttgagctgaagtttcgctctgtcatccaggctggagtgcagtggcacaatcttggctcactgcagcctccacctcccaggttcaagtgattctcctgcatcagcctcctgagtaggtgggtctacaggtgcacaccaccacacccggctaatttttttgtatttttagtagagatggggtttcaccatattggccaggctgctctcaaactcctgacttcaagtgatccacccgtctctgtctcccaaagtgttgggattacaggcatgagccactgcgcccagttcagccttttctgttaacagctgttgatgaggccgagagtggaggaggtgaggatgacctgaggttttccagaggagggaagaggtagatatgtggttacacccctagattttttttttttttttttgggggggaggaatctggctctgtcacccaggctagagtgtagtggcacaatctcggctaactgcagcctccacctcctgggttcaagaaattcttctgcctcaggcttttgagtacctggcattacaggcacctgccaccacgcccggctaatttttgtacttttagtagaggtggggtttcgccatgttggccaggctggtcttgaactcctgagctcaagtgatcctccctcctcggcctcccaaagtgcacccctagatactgatgctgctcctcacccatggacacttccctgggaaatccatttctcaaagaaatttccaagtatacttgtaggcccccagttgaaatctttgagagaacagaccctaggagctgagcagtgacgggtttggacttgcattttcagctggagtgcagatacagttctgctaataggactgcccctttggttactgtaccattgccatgttaggtgtgaattcagttttgttgctcttcatttagaagaatccaaaattggcatgccatgctatataaagcaaaggacagtgtgaagaatagttacctcacaccgttttacaatggctttcagggaaaaaaaagccctgacttacagcatttggggactttcgcagtgtaaatactcctcctttggccaattcaggctaccaacatgacatcattaaacacatatttggcaagagatgtgcacgattgtgtgagctggccccagcacaccactgcaatacccgctaaatgtatccagtgcattccagctgctctgaggctgatgtgtggtggctggggaacaggcctgttgctgagtcgtggtgtgtacacacacacacaatttacctccttctctgtttcacttgcccttggcctagggaatgaactacatctcagtctaaggaaccactaaattggattcaaagacagttgagcagatctacagccctgttgggtccatccgaaaatcaaggtggccagtaaggtgacagctcttttaggagccttttacctgctataatctgtctgattattggattctttactcaggtcatagcacgtatcctcctctcccagcacatagcctgcacccagcacatctgagtgtgtgttctgaccacatcactattatgtgacctcccacgctcaggtcacgaaaggatcagcaaagaagggcaagaaggcccagcatttggtgcataccaggggcaaatcagacatcacagtattctatgtactattgtgtacctctgctctgggagccaaatccctggatttagttttattcttaaccattgagggatttggttaaatgatttctcactccagctgggtgtggtggctcatgcctgtaatcccagcactttgggaggctgaggccagcggatcactggaggtcaggagttccagaccagcctgaccaacatggtgaaaccctgtctctactaaaaaatacaaaattagccaggcgtggtggcgcatgcctgtaatcccagctacttgggaggctgaggcaggagaatcacttgaacctgggaggcagaggttgcagtgagccaagtgcgtaccactgcactccagcctgggaaacgagtgaaactctgtctcaaaaaaaaaaaaaaaaaaaaaaagtttctcaccccagttcctttgctcagaagggggatggggccatcactggggaagtagccttgagagttcctcaggaacagggtacccagaccatatgacttcccctctccagcctgtaactgtgggcctttttgattctgccacataggtggttgaggcaccatagggaaatgaaaagagactggcacagggtttgaggcttggcaggtaagccaggacctggtgatttccaaggtctgcccagtgccacagtgatttgttagaagattgctaggtgctcctccggtcaaataaacccagctggagtcccttggccctcctgagacttcctccccatgactttgcaacacggtgggttccccttaagacagcagcgtagttctggaagctgaagcccacaggactggggcagctgggagcgttcataagccttcccttgtttagagagagccaggatggggtgggggtgggatttgagttatatctttacatcttggccgggcgcagtggctcacgcctatagtcctagcacttcgggaggctgaggtgggtggatcatgaggtcgggagttcgagaccagcctggccaacatggtgaaaccccatctctactaaaaatagaaaaattagctgggcatggtggcgtgcacctgaaatcccagctgctcgggaggctgagacaggagaatcgcttgagcttgggaggtggaggttgcagtgagccgagatcgtgccactgcactccagcctgggcgacagagcgagactccgcctcaaaaaaaaaaaaaatcgtcaagtcttggtgtttactgtctcaccctctctgtctcttgcagtagtattttgcctttgagtaactgtccccagctccagtgctgcaggcacattgttccagggcctctgtggtgctcctgatgcccctcacccactgtcgaagatccccggtgggcgagggggcggcagggatccttctctctcagctctaatatataaggtaaggaggaccctgggatggaaggctggggttggagctttctcagactccactgtgctgctgctcaaggggaataatcactttcttagtcttctggctcttagcctaggccagtggggggactgtgaaggactctttcagctgaggctgttgcatggcttattgggaatactagaggagagatatcagcaccatttgttgccttttaatctgctgtaattgaggcccagaagttagtttagcttctcactaagactgggatggaaggttagcaaggcagctgaattctgggcttttgagattgtgcccaagggagataacacggaccctgcagtccacttggaatcagactttggctgactggggctccagccaaaccctcatacataccctcatttgtttttggtatttccctttctgacagggaaggaaaagaacatggtgttgggggaaagcgtgggctttcgagtcagggagacctgggtttgaatctcatctctgccattcactgtctttggagccttgggtcagttgcttcattattctcagacttaaagtggagttgttaattaccatctcaagtgcttgtcatgatgataaaggtaatatatgggacagcactttgtacttggcacctagtggacaatttaggtaaatatttccctttctgttttgctagcttttaccaccatcaactggtcttagtgcctggacgagaagctcactgtgacccaggacctccctgtgaatgatggaaaacctcacatcgtccacttccagtatgaggtcaccgaggtgaaggtctcttcttgggatgcagtcctgtccagccagagcctgtttgtagaaatcccagatggattattagctgatgggagcaaagaaggattgttagcactgctagagtttgctgaagagaagatgaaagtgaactatgtcttcatctgcttcaggaagggccgagaagacagagctccactcctgaagaccttcagcttcttgggctttgagattgtacgtccaggccatccctgtgtcccctctcggccagatgtgatgttcatggtttatcccctggaccagaacttgtccgatgaggactaatagtcatagaggatgctttacccaagagccacagtgggggaagaggggaagttaggcagccctgggacagacgagagggctcctcgctgtctagggaaggacactgaggggctcagggtgagggttgcctattgtgttctcggagttgactcgttgaaattgttttccataaagaacagtataaacatattattcacatgtaatcaccaatagtaaatgaagatgtttatgaactggcattagaagctttctaaactgcgctgtgtgatgtgttctatctagcctaggggaggacattgcctagagggggagggactgtctgggttcaggggcatggcctggagggctggtgggcagcactgtcaggctcaggtttccctgctgttggctttctgttttggttattaagacttgtgtattttctttctttgcttcctgtcaccccaggggctcctgagtataggcttttcagtccctgggcagtgtccttgagttgttttttgacactcttacctgggcttctctgtgtgcatttgcgtctggcctggagtaagcaggtccgacccctccttctttacagcttagtgttattctggcatttggttaagctggcttaatctgtttaatgttatcagtacattttaaataggggcattgaaatttactcccaccaccagggcttttttgggggatgcctgggcctttaaaacactagccaaactctaattaattctcaaatcactgccaggagttcttgctcctggctgcaggcccaggccccaaggtctccttcttggggtcacaaacagcagtaaggaagaggaatatatagcaactcagggcctgggaattgtggggcaatccgttcttagggactggatacttctggctggctgagtatagtactagctgcctccccaccaggttccgagtagtgtctgagactctgctctgcagggcctagggtagcgctgggagtgtagaagtggcctgcccttaactgttttcactaaacagctttttctaaggggagagcaagggggagagatctagattgggtgagggggacggggatgtcagggaggcaagtgtgttgtgttactgtgtcaataaactgatttaaagttgtgg

SEQ ID NO: 7661 - protein, 60 aa, Homo sapiens
MKVNYVFICFRKGREDRAPLLKTFSFLGFEIVRPGHPCVPSRPDVMFMVYPLDQNLSDED

SEQ ID NO: 7662 - DNA, 1702 bp, Homo sapiens
caggcgctcgctgaggcaaaaggaggcgctcggcccgcggcctgacagggacttagcccgcagagatcgaccccgcgcgcgtgaccccacacccacccactcatccatctatccactccctgcgccgcctcctcccaccctgagcagagccgccgaggatgataaacacccaggacaggacgagaagctcactgtgacccaggacctccctgtgaatgatggaaaacctcacatcgtccacttccagtatgaggtcaccgaggtgaaggtctcttcttgggatgcagtcctgtccagccagagcctgtttgtagaaatcccagatggattattagctgatgggagcaaagaaggattgttagcactgctagagtttgctgaagagaagatgaaagtgaactatgtcttcatctgcttcaggaagggccgagaagacagagctccactcctgaagaccttcagcttcttgggctttgagattgtacgtccaggccatccctgtgtcccctctcggccagatgtgatgttcatggtttatcccctggaccagaacttgtccgatgaggactaatagtcatagaggatgctttacccaagagccacagtgggggaagaggggaagttaggcagccctgggacagacgagagggctcctcgctgtctagggaaggacactgaggggctcagggtgagggttgcctattgtgttctcggagttgactcgttgaaattgttttccataaagaacagtataaacatattattcacatgtaatcaccaatagtaaatgaagatgtttatgaactggcattagaagctttctaaactgcgctgtgtgatgtgttctatctagcctaggggaggacattgcctagagggggagggactgtctgggttcaggggcatggcctggagggctggtgggcagcactgtcaggctcaggtttccctgctgttggctttctgttttggttattaagacttgtgtattttctttctttgcttcctgtcaccccaggggctcctgagtataggcttttcagtccctgggcagtgtccttgagttgttttttgacactcttacctgggcttctctgtgtgcatttgcgtctggcctggagtaagcaggtccgacccctccttctttacagcttagtgttattctggcatttggttaagctggcttaatctgtttaatgttatcagtacattttaaataggggcattgaaatttactcccaccaccagggcttttttgggggatgcctgggcctttaaaacactagccaaactctaattaattctcaaatcactgccaggagttcttgctcctggctgcaggcccaggccccaaggtctccttcttggggtcacaaacagcagtaaggaagaggaatatatagcaactcagggcctgggaattgtggggcaatccgttcttagggactggatacttctggctggctgagtatagtactagctgcctccccaccaggttccgagtagtgtctgagactctgctctgcagggcctagggtagcgctgggagtgtagaagtggcctgcccttaactgttttcactaaacagctttttctaaggggagagcaagggggagagatctagattgggtgagggggacggggatgtcagggaggcaagtgtgttgtgttactgtgtcaataaactgatttaaagttgtgg

SEQ ID NO: 7663 - protein, 60 aa, Homo sapiens; identical to SEQ ID NO: 7661

SEQ ID NO: 7664 - DNA, 729 bp, Homo sapiens
caggcgctcgctgaggcaaaaggaggcgctcggcccgcggcctgacagggacttagcccgcagagatcgaccccgcgcgcgtgaccccacacccacccactcatccatctatccactccctgcgccgcctcctcccaccctgagcagagccgccgaggatgataaacacccaggacagcttagtgttattctggcatttggttaagctggcttaatctgtttaatgttatcagtacattttaaataggggcattgaaatttactcccaccaccagggcttttttgggggatgcctgggcctttaaaacactagccaaactctaattaattctcaaatcactgccaggagttcttgctcctggctgcaggcccaggccccaaggtctccttcttggggtcacaaacagcagtaaggaagaggaatatatagcaactcagggcctgggaattgtggggcaatccgttcttagggactggatacttctggctggctgagtatagtactagctgcctccccaccaggttccgagtagtgtctgagactctgctctgcagggcctagggtagcgctgggagtgtagaagtggcctgcccttaactgttttcactaaacagctttttctaaggggagagcaagggggagagatctagattgggtgagggggacggggatgtcagggaggcaagtgtgttgtgttactgtgtcaataaactgatttaaagttgtgg

SEQ ID NO: 7665 - protein, 67 aa, Homo sapiens
RRSLRQKEALGPRPDRDLARRDRPRARDPTPTHSSIYPLPAPPPPTLSRAAEDDKHPGQLSVILAFG

SEQ ID NO: 7666 - DNA, 1947 bp, Homo sapiens
caggcgctcgctgaggcaaaaggaggcgctcggcccgcggcctgacagggacttagcccgcagagatcgaccccgcgcgcgtgaccccacacccacccactcatccatctatccactccctgcgccgcctcctcccaccctgagcagagccgccgaggatgataaacacccaggacaggattcattattcctaatgagcttggtggcgtagcttcaataccatttgaacactaaagccattatcagaagagaaggccattactggtagtattttgcctttgagtaactgtccccagctccagtgctgcaggcacattgttccagggcctctgtggtgctcctgatgcccctcacccactgtcgaagatccccggtgggcgagggggcggcagggatccttctctctcagctctaatatataaggacgagaagctcactgtgacccaggacctccctgtgaatgatggaaaacctcacatcgtccacttccagtatgaggtcaccgaggtgaaggtctcttcttgggatgcagtcctgtccagccagagcctgtttgtagaaatcccagatggattattagctgatgggagcaaagaaggattgttagcactgctagagtttgctgaagagaagatgaaagtgaactatgtcttcatctgcttcaggaagggccgagaagacagagctccactcctgaagaccttcagcttcttgggctttgagattgtacgtccaggccatccctgtgtcccctctcggccagatgtgatgttcatggtttatcccctggaccagaacttgtccgatgaggactaatagtcatagaggatgctttacccaagagccacagtgggggaagaggggaagttaggcagccctgggacagacgagagggctcctcgctgtctagggaaggacactgaggggctcagggtgagggttgcctattgtgttctcggagttgactcgttgaaattgttttccataaagaacagtataaacatattattcacatgtaatcaccaatagtaaatgaagatgtttatgaactggcattagaagctttctaaactgcgctgtgtgatgtgttctatctagcctaggggaggacattgcctagagggggagggactgtctgggttcaggggcatggcctggagggctggtgggcagcactgtcaggctcaggtttccctgctgttggctttctgttttggttattaagacttgtgtattttctttctttgcttcctgtcaccccaggggctcctgagtataggcttttcagtccctgggcagtgtccttgagttgttttttgacactcttacctgggcttctctgtgtgcatttgcgtctggcctggagtaagcaggtccgacccctccttctttacagcttagtgttattctggcatttggttaagctggcttaatctgtttaatgttatcagtacattttaaataggggcattgaaatttactcccaccaccagggcttttttgggggatgcctgggcctttaaaacactagccaaactctaattaattctcaaatcactgccaggagttcttgctcctggctgcaggcccaggccccaaggtctccttcttggggtcacaaacagcagtaaggaagaggaatatatagcaactcagggcctgggaattgtggggcaatccgttcttagggactggatacttctggctggctgagtatagtactagctgcctccccaccaggttccgagtagtgtctgagactctgctctgcagggcctagggtagcgctgggagtgtagaagtggcctgcccttaactgttttcactaaacagctttttctaaggggagagcaagggggagagatctagattgggtgagggggacggggatgtcagggaggcaagtgtgttgtgttactgtgtcaataaactgatttaaagttgtgg

SEQ ID NO: 7667 - protein, 60 aa, Homo sapiens; identical to SEQ ID NO: 7661

SEQ ID NO: 7668 - DNA, 1215 bp, Homo sapiens
cagttggaggcaggcgctcgctgaggcaaaaggaggcgctcggcccgcggcctgacagggacttagcccgcagagatcgaccccgcgcgcgtgaccccacacccacccactcatccatctatccactccctgcgccgcctcctcccaccctgagcagagccgccgaggatgataaacacccaggacagtgaggggctcagggtgagggttgcctattgtgttctcggagttgactcgttgaaattgttttccataaagaacagtataaacatattattcacatgtaatcaccaatagtaaatgaagatgtttatgaactggcattagaagctttctaaactgcgctgtgtgatgtgttctatctagcctaggggaggacattgcctagagggggagggactgtctgggttcaggggcatggcctggagggctggtgggcagcactgtcaggctcaggtttccctgctgttggctttctgttttggttattaagacttgtgtattttctttctttgcttcctgtcaccccaggggctcctgagtataggcttttcagtccctgggcagtgtccttgagttgttttttgacactcttacctgggcttctctgtgtgcatttgcgtctggcctggagtaagcaggtccgacccctccttctttacagcttagtgttattctggcatttggttaagctggcttaatctgtttaatgttatcagtacattttaaataggggcattgaaatttactcccaccaccagggcttttttgggggatgcctgggcctttaaaacactagccaaactctaattaattctcaaatcactgccaggagttcttgctcctggctgcaggcccaggccccaaggtctccttcttggggtcacaaacagcagtaaggaagaggaatatatagcaactcagggcctgggaattgtggggcaatccgttcttagggactggatacttctggctggctgagtatagtactagctgcctccccaccaggttccgagtagtgtctgagactctgctctgcagggcctagggtagcgctgggagtgtagaagtggcctgcccttaactgttttcactaaacagctttttctaaggggagagcaagggggagagatctagattgggtgagggggacggggatgtcagggaggcaagtgtgttgtgttactgtgtcaataaactgatttaaagttgtgg

SEQ ID NO: 7669 - protein, 42 aa, Homo sapiens
MINTQDSEGLRVRVAYCVLGVDSLKLFSIKNSINILFTCNHQ

SEQ ID NO: 7670 - DNA, 1808 bp, Homo sapiens
gcggcggtggcggccggggagggtcagttggaggcaggcgctcgctgaggcaaaaggaggcgctcggcccgcggcctgacagggacttagcccgcagagatcgaccccgcgcgcgtgaccccacacccacccactcatccatctatccactccctgcgccgcctcctcccaccctgagcagagccgccgaggatgataaacacccaggacagtagtattttgcctttgagtaactgtccccagctccagtgctgcaggcacattgttccagggcctctgtggtgctcctgatgcccctcacccactgtcgaagatccccggtgggcgagggggcggcagggatccttctctctcagctctaatatataaggacgagaagctcactgtgacccaggacctccctgtgaatgatggaaaacctcacatcgtccacttccagtatgaggtcaccgaggtgaaggtctcttcttgggatgcagtcctgtccagccagagcctgtttgtagaaatcccagatggattattagctgatgggagcaaagaaggctccactcctgaagaccttcagcttcttgggctttgagattgtacgtccaggccatccctgtgtcccctctcggccagatgtgatgttcatggtttatcccctggaccagaacttgtccgatgaggactaatagtcatagaggatgctttacccaagagccacagtgggggaagaggggaagttaggcagccctgggacagacgagagggctcctcgctgtctagggaaggacactgaggggctcagggtgagggttgcctattgtgttctcggagttgactcgttgaaattgttttccataaagaacagtataaacatattattcacatgtaatcaccaatagtaaatgaagatgtttatgaactggcattagaagctttctaaactgcgctgtgtgatgtgttctatctagcctaggggaggacattgcctagagggggagggactgtctgggttcaggggcatggcctggagggctggtgggcagcactgtcaggctcaggtttccctgctgttggctttctgttttggttattaagacttgtgtattttctttctttgcttcctgtcaccccaggggctcctgagtataggcttttcagtccctgggcagtgtccttgagttgttttttgacactcttacctgggcttctctgtgtgcatttgcgtctggcctggagtaagcaggtccgacccctccttctttacagcttagtgttattctggcatttggttaagctggcttaatctgtttaatgttatcagtacattttaaataggggcattgaaatttactcccaccaccagggcttttttgggggatgcctgggcctttaaaacactagccaaactctaattaattctcaaatcactgccaggagttcttgctcctggctgcaggcccaggccccaaggtctccttcttggggtcacaaacagcagtaaggaagaggaatatatagcaactcagggcctgggaattgtggggcaatccgttcttagggactggatacttctggctggctgagtatagtactagctgcctccccaccaggttccgagtagtgtctgagactctgctctgcagggcctagggtagcgctgggagtgtagaagtggcctgcccttaactgttttcactaaacagctttttctaaggggagagcaagggggagagatctagattgggtgagggggacggggatgtcagggaggcaagtgtgttgtgttactgtgtcaataaactgatttaaagttgtgg

SEQ ID NO: 7671 - protein, 48 aa, Homo sapiens
MGAKKAPLLKTFSFLGFEIVRPGHPCVPSRPDVMFMVYPLDQNLSDED

SEQ ID NO: 7672 - DNA, 1848 bp, Homo sapiens
gcggcggtggcggccggggagggtcagttggaggcaggcgctcgctgaggcaaaaggaggcgctcggcccgcggcctgacagggacttagcccgcagagatcgaccccgcgcgcgtgaccccacacccacccactcatccatctatccactccctgcgccgcctcctcccaccctgagcagagccgccgaggatgataaacacccaggacagtagtattttgcctttgagtaactgtccccagctccagtgctgcaggcacattgttccagggcctctgtggtgctcctgatgcccctcacccactgtcgaagatccccggtgggcgagggggcggcagggatccttctctctcagctctaatatataaggacgagaagctcactgtgacccaggacctccctgtgaatgatggaaaacctcacatcgtccacttccagtatgaggtcaccgaggtgaaggtctcttcttgggatgcagtcctgtccagccagagcctgtttgtagaaatcccagatggattattagctgatgggagcaaagaaggattgttagcactgctagagtttgctgaagagaagatgaaactccactcctgaagaccttcagcttcttgggctttgagattgtacgtccaggccatccctgtgtcccctctcggccagatgtgatgttcatggtttatcccctggaccagaacttgtccgatgaggactaatagtcatagaggatgctttacccaagagccacagtgggggaagaggggaagttaggcagccctgggacagacgagagggctcctcgctgtctagggaaggacactgaggggctcagggtgagggttgcctattgtgttctcggagttgactcgttgaaattgttttccataaagaacagtataaacatattattcacatgtaatcaccaatagtaaatgaagatgtttatgaactggcattagaagctttctaaactgcgctgtgtgatgtgttctatctagcctaggggaggacattgcctagagggggagggactgtctgggttcaggggcatggcctggagggctggtgggcagcactgtcaggctcaggtttccctgctgttggctttctgttttggttattaagacttgtgtattttctttctttgcttcctgtcaccccaggggctcctgagtataggcttttcagtccctgggcagtgtccttgagttgttttttgacactcttacctgggcttctctgtgtgcatttgcgtctggcctggagtaagcaggtccgacccctccttctttacagcttagtgttattctggcatttggttaagctggcttaatctgtttaatgttatcagtacattttaaataggggcattgaaatttactcccaccaccagggcttttttgggggatgcctgggcctttaaaacactagccaaactctaattaattctcaaatcactgccaggagttcttgctcctggctgcaggcccaggccccaaggtctccttcttggggtcacaaacagcagtaaggaagaggaatatatagcaactcagggcctgggaattgtggggcaatccgttcttagggactggatacttctggctggctgagtatagtactagctgcctccccaccaggttccgagtagtgtctgagactctgctctgcagggcctagggtagcgctgggagtgtagaagtggcctgcccttaactgttttcactaaacagctttttctaaggggagagcaagggggagagatctagattgggtgagggggacggggatgtcagggaggcaagtgtgttgtgttactgtgtcaataaactgatttaaagttgtgg

SEQ ID NO: 7673 - protein, 32 aa, Homo sapiens
MINTQDSSILPLSNCPQLQCCRHIVPGPLWCS

SEQ ID NO: 7674 - DNA, 1921 bp, Homo sapiens
ctcgggggcggggcggcggcggcggcggcggcggtggcggccggggagggtcagttggaggcaggcgctcgctgaggcaaaaggaggcgctcggcccgcggcctgacagggacttagcccgcagagatcgaccccgcgcgcgtgaccccacacccacccactcatccatctatccactccctgcgccgcctcctcccaccctgagcagagccgccgaggatgataaacacccaggacagtagtattttgcctttgagtaactgtccccagctccagtgctgcaggcacattgttccagggcctctgtggtgctcctgatgcccctcacccactgtcgaagatccccggtgggcgagggggcggcagggatccttctctctcagctctaatatataaggacgagaagctcactgtgacccaggacctccctgtgaatgatggaaaacctcacatcgtccacttccagtatgaggtcaccgaggtgaaggtctcttcttgggatgcagtcctgtccagccagagcctgtttgtagaaatcccagatggattattagctgatgggagcaaagaaggattgttagcactgctagagtttgctgaagagaagatgaaagtgaactatgtcttcatctgcttcaggaagggccgagaagacagagctccactcctgaagaccttcagcttcttgggctttgagattgtacgtccaggccatccctgtgtcccctctcggccagatgtgatgttcatggtttatcccctggaccagaacttgtccgatgaggactaatagtcatagaggatgctttacccaagagccacagtgggggaagaggggaagttaggcagccctgggacagacgagagggctcctcgctgtctagggaaggacactgaggggctcagggtgagggttgcctattgtgttctcggagttgactcgttgaaattgttttccataaagaacagtataaacatattattcacatgtaatcaccaatagtaaatgaagatgtttatgaactggcattagaagctttctaaactgcgctgtgtgatgtgttctatctagcctaggggaggacattgcctagagggggagggactgtctgggttcaggggcatggcctggagggctggtgggcagcactgtcaggctcaggtttccctgctgttggctttctgttttggttattaagacttgtgtattttctttctttgcttcctgtcaccccaggggctcctgagtataggcttttcagtccctgggcagtgtccttgagttgttttttgacactcttacctgggcttctctgtgtgcatttgcgtctggcctggagtaagcaggtccgacccctccttctttacagcttagtgttattctggcatttggttaagctggcttaatctgtttaatgttatcagtacattttaaataggggcattgaaatttactcccaccaccagggcttttttgggggatgcctgggcctttaaaacactagccaaactctaattaattctcaaatcactgccaggagttcttgctcctggctgcaggcccaggccccaaggtctccttcttggggtcacaaacagcagtaaggaagaggaatatatagcaactcagggcctgggaattgtggggcaatccgttcttagggactggatacttctggctggctgagtatagtactagctgcctccccaccaggttccgagtagtgtctgagactctgctctgcagggcctagggtagcgctgggagtgtagaagtggcctgcccttaactgttttcactaaacagctttttctaaggggagagcaagggggagagatctagattgggtgagggggacggggatgtcagggaggcaagtgtgttgtgttactgtgtcaataaactgatttaaagttgtgg

SEQ ID NO: 7675 - protein, 60 aa, Homo sapiens; identical to SEQ ID NO: 7661

SEQ ID NO: 7676 - DNA, 618 bp, Homo sapiens
caggcgctcgctgaggcaaaaggaggcgctcggcccgcggcctgacagggacttagcccgcagagatcgaccccgcgcgcgtgaccccacacccacccactcatccatctatccactccctgcgccgcctcctcccaccctgagcagagccgccgaggatgataaacacccaggacagtagtattttgcctttgagtaactgtccccagctccagtgctgcaggcacattgttccagggcctctgtggtgctcctgatgcccctcacccactgtctccttcttggggtcacaaacagcagtaaggaagaggaatatatagcaactcagggcctgggaattgtggggcaatccgttcttagggactggatacttctggctggctgagtatagtactagctgcctccccaccaggttccgagtagtgtctgagactctgctctgcagggcctagggtagcgctgggagtgtagaagtggcctgcccttaactgttttcactaaacagctttttctaaggggagagcaagggggagagatctagattgggtgagggggacggggatgtcagggaggcaagtgtgttgtgttactgtgtcaataaactgatttaaagttgtg

SEQ ID NO: 7677 - protein, 42 aa, Homo sapiens [sequence omitted]

SEQ ID NO: 7678 - DNA, 346 bp, Homo sapiens
caggcgctcgctgaggcaaaaggaggcgctcggcccgcggcctgacagggacttagcccgcagagatcgaccccgcgcgcgtgaccccacacccacccactcatccatctatccactccctgcgccgcctcctcccaccctgagcagagccgccgaggatgataaacacccagggcctagggtagcgctgggagtgtagaagtggcctgcccttaactgttttcactaaacagctttttctaaggggagagcaagggggagagatctagattgggtgagggggacggggatgtcagggaggcaagtgtgttgtgttactgtgtcaataaactgatttaaagttgtg

SEQ ID NO: 7679 - protein, 65 aa, Homo sapiens
RRSLRQKEALGPRPDRDLARRDRPRARDPTPTHSSIYPLPAPPPPTLSRAAEDDKHPGPRVALGV

SEQ ID NO: 7680 - DNA, 442 bp, Homo sapiens
gttggaggcaggcgctcgctgaggcaaaaggaggcgctcggcccgcggcctgacagggacttagcccgcagagatcgaccccgcgcgcgtgaccccacacccacccactcatccatctatccactccctgcgccgcctcctcccaccctgagcagagccgccgaggatgataaacacccaggacagtagtattttgcctttgagtaactgtccccagctccagtgctgcaggcacattgttccagggcctctgtggtgctcctgatgcccctcacccactgtcgaagatccccggtgggcgagggggcggcagggatccttctctctcagagctttttctaaggggagagcaagggggagagatctagattgggtgagggggacggggatgtcagggaggcaagtgtgttgtgttactgtgtcaataaactgatttaaagtt

SEQ ID NO: 7681 - protein, 32 aa, Homo sapiens; identical to SEQ ID NO: 7673

SEQ ID NO: 7682 - DNA, 830 bp, Homo sapiens
caggcgctcgctgaggcaaaaggaggcgctcggcccgcggcctgacagggacttagcccgcagagatcgaccccgcgcgcgtgaccccacacccacccactcatccatctatccactccctgcgccgcctcctcccaccctgagcagagccgccgaggatgataaacacccaggacaggacgagaagctcactgtgacccaggacctccctgtgaatgatggaaaacctcacatcgtccacttccagtatgaggtcaccgaggtgaaggtctcttcttgggatgcagtcctgtccagccagagcctgtttgtagaaatcccagatggattattagctgatgggagcaaagaaggattgttagcactgctagagtttgctgaagagaagatgaaagtgaactatgtcttcatctgcttcaggaagggccgagaagacagagctccactcctgaagaccttcagcttcttgggctttgagattgtacgtccaggccatccctgtgtcccctctcggccagatgtgatgttcatggtttatcccctggaccagaacttgtccgatgaggactaatagtcatagaggatgctttacccaagagccacagtgggggaagaggggaagttaggcagccctgggacagacgagagggctcctcgctgtctagggaaggacactgaggggctcagggtgagggttgcctattgtgttctcggagttgactcgttgaaattgttttccataaagaacagtataaacatattattcacatgtaatcaccaatagtaaatgaagatgtttatgaactggcattagaagctttctaaactgc

SEQ ID NO: 7683 - protein, 60 aa, Homo sapiens; identical to SEQ ID NO: 7661

SEQ ID NO: 7684 - DNA, 1075 bp, Homo sapiens
caggcgctcgctgaggcaaaaggaggcgctcggcccgcggcctgacagggacttagcccgcagagatcgaccccgcgcgcgtgaccccacacccacccactcatccatctatccactccctgcgccgcctcctcccaccctgagcagagccgccgaggatgataaacacccaggacaggattcattattcctaatgagcttggtggcgtagcttcaataccatttgaacactaaagccattatcagaagagaaggccattactggtagtattttgcctttgagtaactgtccccagctccagtgctgcaggcacattgttccagggcctctgtggtgctcctgatgcccctcacccactgtcgaagatccccggtgggcgagggggcggcagggatccttctctctcagctctaatatataaggacgagaagctcactgtgacccaggacctccctgtgaatgatggaaaacctcacatcgtccacttccagtatgaggtcaccgaggtgaaggtctcttcttgggatgcagtcctgtccagccagagcctgtttgtagaaatcccagatggattattagctgatgggagcaaagaaggattgttagcactgctagagtttgctgaagagaagatgaaagtgaactatgtcttcatctgcttcaggaagggccgagaagacagagctccactcctgaagaccttcagcttcttgggctttgagattgtacgtccaggccatccctgtgtcccctctcggccagatgtgatgttcatggtttatcccctggaccagaacttgtccgatgaggactaatagtcatagaggatgctttacccaagagccacagtgggggaagaggggaagttaggcagccctgggacagacgagagggctcctcgctgtctagggaaggacactgaggggctcagggtgagggttgcctattgtgttctcggagttgactcgttgaaattgttttccataaagaacagtataaacatattattcacatgtaatcaccaatagtaaatgaagatgtttatgaactggcattagaagctttctaaactgc

SEQ ID NO: 7685 - protein, 60 aa, Homo sapiens; identical to SEQ ID NO: 7661

SEQ ID NO: 7686 - DNA, 936 bp, Homo sapiens
gcggcggtggcggccggggagggtcagttggaggcaggcgctcgctgaggcaaaaggaggcgctcggcccgcggcctgacagggacttagcccgcagagatcgaccccgcgcgcgtgaccccacacccacccactcatccatctatccactccctgcgccgcctcctcccaccctgagcagagccgccgaggatgataaacacccaggacagtagtattttgcctttgagtaactgtccccagctccagtgctgcaggcacattgttccagggcctctgtggtgctcctgatgcccctcacccactgtcgaagatccccggtgggcgagggggcggcagggatccttctctctcagctctaatatataaggacgagaagctcactgtgacccaggacctccctgtgaatgatggaaaacctcacatcgtccacttccagtatgaggtcaccgaggtgaaggtctcttcttgggatgcagtcctgtccagccagagcctgtttgtagaaatcccagatggattattagctgatgggagcaaagaaggctccactcctgaagaccttcagcttcttgggctttgagattgtacgtccaggccatccctgtgtcccctctcggccagatgtgatgttcatggtttatcccctggaccagaacttgtccgatgaggactaatagtcatagaggatgctttacccaagagccacagtgggggaagaggggaagttaggcagccctgggacagacgagagggctcctcgctgtctagggaaggacactgaggggctcagggtgagggttgcctattgtgttctcggagttgactcgttgaaattgttttccataaagaacagtataaacatattattcacatgtaatcaccaatagtaaatgaagatgtttatgaactggcattagaagctttctaaactgc

SEQ ID NO: 7687 - protein, 48 aa, Homo sapiens; identical to SEQ ID NO: 7671

SEQ ID NO: 7688 - DNA, 976 bp, Homo sapiens
gcggcggtggcggccggggagggtcagttggaggcaggcgctcgctgaggcaaaaggaggcgctcggcccgcggcctgacagggacttagcccgcagagatcgaccccgcgcgcgtgaccccacacccacccactcatccatctatccactccctgcgccgcctcctcccaccctgagcagagccgccgaggatgataaacacccaggacagtagtattttgcctttgagtaactgtccccagctccagtgctgcaggcacattgttccagggcctctgtggtgctcctgatgcccctcacccactgtcgaagatccccggtgggcgagggggcggcagggatccttctctctcagctctaatatataaggacgagaagctcactgtgacccaggacctccctgtgaatgatggaaaacctcacatcgtccacttccagtatgaggtcaccgaggtgaaggtctcttcttgggatgcagtcctgtccagccagagcctgtttgtagaaatcccagatggattattagctgatgggagcaaagaaggattgttagcactgctagagtttgctgaagagaagatgaaactccactcctgaagaccttcagcttcttgggctttgagattgtacgtccaggccatccctgtgtcccctctcggccagatgtgatgttcatggtttatcccctggaccagaacttgtccgatgaggactaatagtcatagaggatgctttacccaagagccacagtgggggaagaggggaagttaggcagccctgggacagacgagagggctcctcgctgtctagggaaggacactgaggggctcagggtgagggttgcctattgtgttctcggagttgactcgttgaaattgttttccataaagaacagtataaacatattattcacatgtaatcaccaatagtaaatgaagatgtttatgaactggcattagaagctttctaaactgc

SEQ ID NO: 7689 - protein, 32 aa, Homo sapiens; identical to SEQ ID NO: 7673

SEQ ID NO: 7690 - DNA, 1049 bp, Homo sapiens
ctcgggggcggggcggcggcggcggcggcggcggtggcggccggggagggtcagttggaggcaggcgctcgctgaggcaaaaggaggcgctcggcccgcggcctgacagggacttagcccgcagagatcgaccccgcgcgcgtgaccccacacccacccactcatccatctatccactccctgcgccgcctcctcccaccctgagcagagccgccgaggatgataaacacccaggacagtagtattttgcctttgagtaactgtccccagctccagtgctgcaggcacattgttccagggcctctgtggtgctcctgatgcccctcacccactgtcgaagatccccggtgggcgagggggcggcagggatccttctctctcagctctaatatataaggacgagaagctcactgtgacccaggacctccctgtgaatgatggaaaacctcacatcgtccacttccagtatgaggtcaccgaggtgaaggtctcttcttgggatgcagtcctgtccagccagagcctgtttgtagaaatcccagatggattattagctgatgggagcaaagaaggattgttagcactgctagagtttgctgaagagaagatgaaagtgaactatgtcttcatctgcttcaggaagggccgagaagacagagctccactcctgaagaccttcagcttcttgggctttgagattgtacgtccaggccatccctgtgtcccctctcggccagatgtgatgttcatggtttatcccctggaccagaacttgtccgatgaggactaatagtcatagaggatgctttacccaagagccacagtgggggaagaggggaagttaggcagccctgggacagacgagagggctcctcgctgtctagggaaggacactgaggggctcagggtgagggttgcctattgtgttctcggagttgactcgttgaaattgttttccataaagaacagtataaacatattattcacatgtaatcaccaatagtaaatgaagatgtttatgaactggcattagaagctttctaaactgc

SEQ ID NO: 7691 - protein, 60 aa, Homo sapiens; identical to SEQ ID NO: 7661

SEQ ID NO: 7692 - DNA, 728 bp, Homo sapiens
agttggaggcaggcgctcgctgaggcaaaaggaggcgctcggcccgcggcctgacagggacttagcccgcagagatcgaccccgcgcgcgtgaccccacacccacccactcatccatctatccactccctgcgccgcctcctcccaccctgagcagagccgccgaggatgataaacacccaggacagtagtattttgcctttgagtaactgtccccagctccagtgctgcaggcacattgttccagggcctctgtggtgctcctgatgcccctcacccactgtcgaagatccccggtgggcgagggggcggcagggatccttctctctcagctctaatatataaggacgagaagctcactgtgacccaggacctccctgtgaatgatggaaaacctcacatcgtccacttccagtatgaggtcaccgaggtgaaggtctcttcttgggatgcagtcctgtccagccagagcctgtttgtagaaatcccagatggattattagctgatgggagcaaagaagggtaaagagccaaatgctggggagggaaaggaggtcccattccagagaagagtatatgtttactgtgggtaacagaattgtaggggagtctgtgccttctcccttagctctagactccccaagcagataccgttttgtaacaggttatttttagccagtaagacaggcctgctctaggttataattaaagcagattgttatcacatta

SEQ ID NO: 7693 - protein, 32 aa, Homo sapiens; identical to SEQ ID NO: 7673

SEQ ID NO: 7694 - DNA, 1609 bp, Homo sapiens
attacctggggagctttaaaactatatgctaataatcaggacactctaggccaatgagaccaatctttgaagcctgtgagcatttccactcgtctgccaaggcagagacagccccatccagaagcaagaatgagacctcggggccctggcgcccttgagccaaccccatctctgttctcacaacttgccttgcctgacctctggagaaaaacttcagaaaatatcaccctttcttcccacctgctcccgctggccaaaatccccatcaaagcctggcttcagcccctcagactgggaactctatccaaatggagtgtggggagtgtgggtgaggaaggacggaaggaagtaggtcacacgctggctaccgcacaacggggaagaggccaacctcggaaaggcagaagagtggccgccatgccgagcttccagagatggagagaaggtctaggaagccaccttggggaagccgcctgagcaggagcggggcagccagggatcagagcccacggcctgctggggacccatcctgggcacggggctctgggctctgtgcccattctctgatgtgccacattgttctgctacttccttctctggaagtaataagggggttgggggtgggacagcacggccaggagtagatggagcggggtggagctgccagtgggggaggaggctgcggttcattcccacgaccagctgcccttctggccgccctgggactgcgtgggaaaaggtctgggaagtatgggggatggtgtgtgtgtgtgtgtgtgtgtgtgtgtgtgtgtgtgtgtgtgttttcatgtgtctgactcccttgcttggcttcagtcacaggacaaagccctttgagaaacagtcaccaacctgtgttcccactgggctctgtcctgggagaggcacaagaacccgccctgacgcctgagagaaagactctgaaggcctcaggaccaaatccctggaggggtcttggcgtctaatgaatctagattgactgacttccctgggatgcttctggaaccttctgctaagccctcagcttcttggcagagctctattactaactggatatcagaatatgggtgcaaactagacatggggagtgaagtcagccattctcacagcatctacctaagaaggccaggatcctccacagccacgtagatcgtagagccagtggcatgccggggatgatatacaaagacaagaaactctgaaacagagaacacaaactaacagcccataggccaaatgcagcccgcaggcacatggcttatttggccaacacagcatttaagaaatgtttgagccgaggctgggtgaggtggctcaggcctataatcccagtactttgggaggccgaggcaggtggatcacctgaggtcaggagttcaagaccagcctggccaacatgacaaaaccccgtctctactaaaaatacaagaattagccaggtgtggtggtccatgcctgcagtcccagctacccagctgcttggggggctgaggcaggagaatcgcttgaacctggggggcggaggttgccgtgagctgagatcacaccactgcactccagcctgggcgacagagcgaaactccgtctc

SEQ ID NO: 7695 - protein, 34 aa, Homo sapiens
MRPIFEACEHFHSSAKAETAPSRSKNETSGPWRP

SEQ ID NO: 7696 - DNA, 1743 bp, Homo sapiens
ccatcgggatgacaccgggagagctcgctcgaagcagtgggtaggggactgctgaagcacgtgcattcgttacttgaacattgtccggacactgtttgtcagcggcctccctgtggacattaaacccagagaactctacttgctcttccggccgttcaaggggtatgaagggtccctgatcaagctcactgcaagacagcctgttggttttgtgatctttgacagccgtgcaggagcagaagcggccaagaatgcgctgaacggtattcgctttgatcccgaaaatccacagactctgaggctagagtttgccaaagccaacaccaagatggccaagagcaagctaatggcaactccaaatcccagcaacgtgcaccccgccctaggagcacacttcatcgcacgggacccctatgacctgatgggggctgctctgatccctgcatccccagaggcctgggccccctaccctttgtacaccacagagctgaccccagccatctcccatgctgcgttcacctacccaactgccactgccgctgccgccgccctccacgctcaggtgcgctggtacccttcctctgacaccacccagcaaggatggaagtaccgtcagttctgttagtttttcagtctggtcaccggggaggtggttctggtaatctgtggtggtgccgggacaggcgccccgagttcccactgcccccgggcggcctgcacagagctgctgccctccagagactgtgaatcccaagcctgactcagtggactgcttcctgttcccctccctcctcttcctcaccttgttctgcaccctcaagcctttctccaatgcctcccaggaggatttggggactttctccctggggcgcccagatccagctcggaggcctcactgggacctggcaaggcctgacctcccgcccaaacttgcttctgtagctccccctcgaggaagtgaggtgtttaattttgcatgttttctggcatgaattaagacacttatacttgtatatatgagtgtacagtttgttctcacactgtcaccatagcgacaggtcctggctcccagtggttcatcctgcctgcccctctctcctcgccccgcccctgcacccaccccgcttcagggaggcccaagttccgtggccccacacgcttccaggctcagctcccacctccacccaacagatagatggggtttgctttttcatttcacatggggctcctccgctcctgccttctcggatgggccaacagtcgtaagaaagccctctctgcccgttctgttcacctctccacagcgcaccccgcccgccgctgctcctcattctttccaaacctcgaaaccaaccaaaacgtgagaagtatttttgtaccctgtgtaacaaaatatttatgcatcataaaggatttttcatgtgcgtaccattaattattaaagcgacctcgttcgccctgtcagataagtttaatgtttagtttgaggcatgaagaagaaaagggtttccattcttcagcagtacgcctttgtgtctggcatttgtttaagaaaatgaaatgaaggaaacactgtgcaatgttttttgttttgagcatatcagtgctttactgtcagccgcagctgtgaccgtctggccatttcagacttgggagatgaggcggctgttgtcattgctgatcctgtgagaatgtgaaactggataatatatgaaatgcaaaataaaacaaaaccaaaatgac

SEQ ID NO: 7697 - protein, 98 aa, Homo sapiens
MAKSKLMATPNPSNVHPALGAHFIARDPYDLMGAALIPASPEAWAPYPLYTTELTPAISHAAFTYPTATAAAAALHAQVRWYPSSDTTQQGWKYRQFC

SEQ ID NO: 7698 - DNA, 2016 bp, Homo sapiens
actcgccggtcgcagtgaaaaggcggaggcggcggcccctccggctcccactgcctcccccgccgcaccccctccccaccttccgcacccgccaaacttgatgtgaccctggcccgacgcggaggctgcccctctcactgccccgtgggtcccccgccacccgctccgcacccgcgagcgcaccgctccccgcgccccttcccacttcccgcggggccggcgccgcgctcgccctcgcgttccttcccgccgccccctcccccgcaccatgagcaacctgaagccggacggcgagcacggcggcagcaccggcaccggctccggcgcgggctccggcggcgccctggaggaggaggtccggacactgtttgtcagcggcctccctgtggacattaaacccagagaactctacttgctcttccggccgttcaaggggtatgaagggtccctgatcaagctcactgcaagacagcctgttggttttgtgatctttgacagccgtgcaggagcagaagcggccaagaatgcgctgaacggtattcgctttgatcccgaaaatccacagactctgaggctagagtttgccaaagccaacaccaagatggccaagagcaagctaatggcaactccaaatcccagcaacgtgcaccccgccctaggagcacacttcatcgcacgggacccctatgacctgatgggggctgctctgatccctgcatccccagaggcctgggccccctaccctttgtacaccacagagctgaccccagccatctcccatgctgcgttcacctacccaactgccactgccgctgccgccgccctccacgctcaggtgcgctggtacccttcctctgacaccacccagcaaggatggaagtaccgtcagttctgttagtttttcagtctggtcaccggggaggtggttctggtaatctgtggtggtgccgggacaggcgccccgagttcccactgcccccgggcggcctgcacagagctgctgccctccagagactgtgaatcccaagcctgactcagtggactgcttcctgttcccctccctcctcttcctcaccttgttctgcaccctcaagcctttctccaatgcctcccaggaggatttggggactttctccctggggcgcccagatccagctcggaggcctcactgggacctggcaaggcctgacctcccgcccaaacttgcttctgtagctccccctcgaggaagtgaggtgtttaattttgcatgttttctggcatgaattaagacacttatacttgtatatatgagtgtacagtttgttctcacactgtcaccatagcgacaggtcctggctcccagtggttcatcctgcctgcccctctctcctcgccccgcccctgcacccaccccgcttcagggaggcccaagttccgtggccccacacgcttccaggctcagctcccacctccacccaacagatagatggggtttgctttttcatttcacatggggctcctccgctcctgccttctcggatgggccaacagtcgtaagaaagccctctctgcccgttctgttcacctctccacagcgcaccccgcccgccgctgctcctcattctttccaaacctcgaaaccaaccaaaacgtgagaagtatttttgtaccctgtgtaacaaaatatttatgcatcataaaggatttttcatgtgcgtaccattaattattaaagcgacctcgttcgccctgtcagataagtttaatgtttagtttgaggcatgaagaagaaaagggtttccattcttcagcagtacgcctttgtgtctggcatttgtttaagaaaatgaaatgaaggaaacactgtgcaatgttttttgttttgagcatatcagtgctttactgtcagccgcagctgtgaccgtctggccatttcagacttgggagatgaggcggctgttgtcattgctgatcctgtgagaatgtgaaactggataatatatgaaatgcaaaataaaacaaaaccaaaatgac

SEQ ID NO: 7699 - protein, 209 aa, Homo sapiens; identical to SEQ ID NO: 1060

SEQ ID NO: 7700 - DNA, 1555 bp, Homo sapiens
ggttctgcttccagtccaagagctggaagaggtgtgtgccagtgaccctggagctgaccaaggtgtggaggcaggcagaccagaccttcatctctctactgcaggccgtgaggctaggcaggtgggctctgccctgacagtccagccccaacaggtgttcagatgaggtgacccgccagctccaggccacagcttcccacaaggtggggcgagatgggattgtggccacgaggctctgcacccaccaggatgatgtggccctcaccaacgagaggcggcttcaggagctgccaggtaaggtacacagatttgaggctatggacagcaaccctgagctggccagtaccctggatgcccagtgtcctgttagccagctccttcaactaaagctgggggcccaggtgatgctggtgaaaaacttatcggtgtctcggggcctggtgaatggtgcccgaggggtggtagttgggttcgaggcagaagggagagggctaccccaggtgcggttcctgtgtggagtcactgaggtcatccacgctgaccgctggacggtgcaggccaccgggggccagctcctcagtcggcagcagctgcccctccagctggcctgggcgatgtccatccacaagagccaaggcatgaccctggattgtgtggagatttctctgggccgtgtgtttgccagtggccaggcctatgtggccctttctcgggcccgcagcctgcagggcctacgtgtgctggactttgaccccatggcggttcgctgtgacccccgtgtgctgcacttctatgccaccctgcggcggggcaggagcctcagtctggagtccccagatgatgatgaggcagcctcagaccaggagaacatggacccaatcctctgagcctcacccacaaagagaagacaaagggtggcctgtggcctccccgtcctcctgctccctagtggcccagggccccagggaataactggagtaggcaggcagtgtccccttctgtattttttagggactctcagcctcctggcagggttaaagggagagtactttaaacccatataccagctgtgcttcagtttctctcactttgccctgggtaagctgctgtagggtcagaagtaaccctttctgtgccagttgagaatgagcctgtgtggtagctgatgtcagaggacaaagctctctgcaagggctggacacagagctgcagagtcctgaacatccctcctttcaggctgcagaagggagaggcaatgaagacaggtgctccggaagcagcatcagggctcttggaggggactggtggggactcaggctgggtgcagcctccaaacagagaacggaacttaggtgtgtctctacagctaggcccagcctagcccagcccagaacaaacacccttcagagcctaaccaaagaacataagctgcaaaatgtgcacccatattttaagctgctttttcaggggataaatagtgtttggggacattgaaatggatgttctcaggttgtatttatttcggacaaataaactagagaattgtgtaaaaact

SEQ ID NO: 7701 - protein, 189 aa, Homo sapiens [sequence omitted]

SEQ ID NO: 7702 - DNA, 1793 bp, Homo sapiens
atagtgtcactcacaggcatcggctcaggccaggctcctctagcccagtgtgtggccctggcccaaaggccaggcgtgcggcagggctggctgaactgccagcggttggtcattgacgagatctcaatggtggaggcagacctgtttgacaaactggaggccgtggccagagctgtccggcagcagaacaagccattcggagggatccagctcatcatctgtggggactttctgcagctgccacctgtgaccaagggctcccagcccccacggttctgcttccagtccaagagctggaagaggtgtgtgccagtgaccctggagctgaccaaggtgtggaggcaggcagaccagaccttcatctctctactgcaggccgtgaggctaggcaggtgttcagatgaggtgacccgccagctccaggccacagcttcccacaaggtggggcgagatgggattgtggccacgaggctctgcacccaccaggatgatgtggccctcaccaacgagaggcggcttcaggagctgccaggtaaggtacacagatttgaggctatggacagcaaccctgagctggccagtaccctggatgcccagtgtcctgttagccagctccttcaactaaagctgggggcccaggtgatgctggtgaaaaacttatcggtgtctcggggcctggtgaatggtgcccgaggggtggtagttgggttcgaggcagaagggagagggctaccccaggtgcggttcctgtgtggagtcactgaggtcatccacgctgaccgctggacggtgcaggccaccgggggccagctcctcagtcggcagcagctgcccctccagctggcctgggcgatgtccatccacaagagccaaggcatgaccctggattgtgtggagatttctctgggccgtgtgtttgccagtggccaggcctatgtggccctttctcgggcccgcagcctgcagggcctacgtgtgctggactttgaccccatggcggttcgctgtgacccccgtgtgctgcacttctatgccaccctgcggcggggcaggagcctcagtctggagtccccagatgatgatgaggcagcctcagaccaggagaacatggacccaatcctctgagcctcacccacaaagagaagacaaagggtggcctgtggcctccccgtcctcctgctccctagtggcccagggccccagggaataactggagtaggcaggcagtgtccccttctgtattttttagggactctcagcctcctggcagggttaaagggagagtactttaaacccatataccagctgtgcttcagtttctctcactttgccctgggtaagctgctgtagggtcagaagtaaccctttctgtgccagttgagaatgagcctgtgtggtagctgatgtcagaggacaaagctctctgcaagggctggacacagagctgcagagtcctgaacatccctcctttcaggctgcagaagggagaggcaatgaagacaggtgctccggaagcagcatcagggctcttggaggggactggtggggactcaggctgggtgcagcctccaaacagagaacggaacttaggtgtgtctctacagctaggcccagcctagcccagcccagaacaaacacccttcagagcctaaccaaagaacataagctgcaaaatgtgcacccatattttaagctgctttttcaggggataaatagtgtttggggacattgaaatggatgttctcaggttgtatttatttcggacaaataaactagagaattgtgtaaaaact

SEQ ID NO: 7703 - protein, 332 aa, Homo sapiens
MVEADLFDKLEAVARAVRQQNKPFGGIQLIICGDFLQLPPVTKGSQPPRFCFQSKSWKRCVPVTLELTKVWRQADQTFISLLQAVRLGRCSDEVTRQLQATASHKVGRDGIVATRLCTHQDDVALTNERRLQELPGKVHRFEAMDSNPELASTLDAQCPVSQLLQLKLGAQVMLVKNLSVSRGLVNGARGVVVGFEAEGRGLPQVRFLCGVTEVIHADRWTVQATGGQLLSRQQLPLQLAWAMSIHKSQGMTLDCVEISLGRVFASGQAYVALSRARSLQGLRVLDFDPMAVRCDPRVLHFYATLRRGRSLSLESPDDDEAASDQENMDPIL

SEQ ID NO: 7704 - DNA, 523 bp, Homo sapiens
tggctgaactgccagcggttggtcattgacgagatctcaatggtggaggcagacctgtttgacaaactggaggccgtggccagagctgtccggcagcagaacaagccattcggagggatccagctcatcatctgtggggactttctgcagctgccacctgtgaccaagggtggacacagagctgcagagtcctgaacatccctcctttcaggctgcagaagggagaggcaatgaagacaggtgctccggaagcagcatcagggctcttggaggggactggtggggactcaggctgggtgcagcctccaaacagagaacggaacttaggtgtgtctctacagctaggcccagcctagcccagcccagaacaaacacccttcagagcctaaccaaagaacataagctgcaaaatgtgcacccatattttaagctgctttttcaggggataaatagtgtttggggacattgaaatggatgttctcaggttgtatttatttcggacaaataaactagagaattgtgt

SEQ ID NO: 7705 - protein, 51 aa, Homo sapiens
MVEADLFDKLEAVARAVRQQNKPFGGIQLIICGDFLQLPPVTKGGHRAAES

SEQ ID NO: 7706 - DNA, 1598 bp, Homo sapiens
accagcagaggcggtgacgatgctctcgggcatagaggcggcggcaggggaatatgaggactcggagctgcggtgccgcgtggctgtggaggagctgagcccgggcgggcagccgcgaaggcgccaggccctgcgcaccgcggagctgagcctgggtcgcaacgagcgccgcgagttgatgctgcggctgcaagcgccagggcccgcggggcggccgcgctgctttcctctgcgcgccgcgcgcctcttcacgcgtttcgccgaggccgggcgcagcaccctgcggctccccgcccacgacacccccggggccggcgcagtgcagctgctgctctcggactgccccccagaccgcctgcgccgcttcctgcgcacattgcgcctcaagctggctgcggccccgggtcccgggccggcctccgcccgagcgcagctgctgggcccgcggccccgcgacttcgtcaccatcagccctgtgcagcccgaggagcggcggctcagggcggccacccgggttccggacactacgctggtgaagcggcctgtggagccccaggctggggccgagcctagcacagaagccccaaggtggcccctgcctgtgaagaggctgagcttgccctccaccaagccacagctttctgaggaacaggctgctgtgctgagggccgtcctgaaaggccagagcatcttcttcactgggagtgcaggtagtgggggcagagaggaggtagggggacagtggtggggtgggatagaggaacagggagacctgtctaactttgcccctgtccaggaacagggaagtcatatctgctaaagcgaatcctgggctcactgccccccacaggcactgtggccactgccagcactggggtggcagcctgccacatcgggggcaccaccctccatgcctttgcaggtaagtaggaacccctagggcttgagctaagagcaagcccagcttctgggaagggagagaggggaggtctgcataaagagggagttttgggggctgggcgccgtggctcactcttgtaatcccaaaactttaggaggccaaggtgggaggatcgcttgagcccaggagtttgagaccagcctggccaacacagtaaaccctgtctccacaaaatttaaaaattagcggccgggcgcagtggctcacgcctgtaatcccagcactttgggaggccgaggcaggcggatcacaaggtcaggagatcaagactatcctggctaacacggtaaaaccctgtctctactaaaaatacaaaaaaattagccaggcatggtggcaagcgcctgtagtcccagctactctggaggctgaggcaggagaatggcgtgaacccaggaggcagagcttgcagtgagccgagatcacgccactgcacttgagcctgggcgacacagcgagactccatctcaaaacaaaacaaaacaaaattagctgagcatggtggtgtgtgcctgtagtcccagctactatggaggttgaggtgggaggatcgcttgagcccatgaggcccaggttacagtgagccaagatcgtgccactgcacttcagcctgggtgacagaaagagaccttctctc

SEQ ID NO: 7707 - protein, 266 aa, Homo sapiens
MLSGIEAAAGEYEDSELRCRVAVEELSPGGQPRRRQALRTAELSLGRNERRELMLRLQAPGPAGRPRCFPLRAARLFTRFAEAGRSTLRLPAHDTPGAGAVQLLLSDCPPDRLRRFLRTLRLKLAAAPGPGPASARAQLLGPRPRDFVTISPVQPEERRLRAATRVPDTTLVKRPVEPQAGAEPSTEAPRWPLPVKRLSLPSTKPQLSEEQAAVLRAVLKGQSIFFTGSAGSGGREEVGGQWWGGIEEQGDLSNFAPVQEQGSHIC

SEQ ID NO: 7708 - DNA, 1026 bp, Homo sapiens
cccggcggcgcgtggtgtcgggtctgaaaaccctacgcgactccgaagatttattttcagaaccatccttccagcacactccctctcccctctagcccgcacacagaggctgggcttagccttggggaagatctgcctttggactctcacacccctgtttacactcacagtaccattgtccagttctgggcagaccaccccaaggcctgcccaatccctcccccgcccccaactctacatccttctctgcctttgtaagggactttacgctttggctctctcacccacctgaggcccatgagtgagaaactctgagacctgtgccacgtgccagagggtacagcggaagcgagtagagtctctgtcttcagggaaattgtatccctcttcttgcacaggatgctgaaagaatttacttttaatcatctttattatctcattgaagcttggaattacatagctggaaaggatcttacaggttgtcactctgccacccaggctggagtacagtggcacaatcataactcactgccgccttgaccttcctgctcaagtgatcctcccatctcagcctcccaagtagttggaactacagatgactaccaccacgcctagcaaatttttgtatattttatagagactagggtctcgccatgttgcccaggctggtctcgaactcctggtctcaagagatctgccagcctcagcctgccagagtgctgggattacaggagggtgccaccatgcctggctggaaagaaatcttgagagatatttttcttctccagtgttgtcttgacatatattgaatatcagtggcatgcgtcattgtgtatgagtaaatgagtaggttaagaaaaattttcagctgggtgtggtggctcacgtctgtaatcccaccactttgggaagctgaggcaggtggatcatgaggtcaggagttcaagaccagcctggccaaggtggtgaaaccccatctttactaaaaatacaaaaattagctgggtgtggttgcaggcatctgta

SEQ ID NO: 7709 - protein, 46 aa, Homo sapiens
MLKEFTFNHLYYLIEAWNYIAGKDLTGCHSATQAGVQWHNHNSLPP

SEQ ID NO: 7710 - DNA, 2427 bp, Homo sapiens
cttgggcccccggcagccggcgggacagaacgcggagagtcgccgcctggccgggcgtagacgcggtggcagagcccgcgcggcgctggaagcgagtggcggagcggcgggacctcggcggactcgccatggaggaggagggtgtgaaggaagccggtgagaagcctcggggagcacagatggtggacaaggctggctggatcaagaagagcagtgggggcctcctgggtttctggaaagaccgatatctgctcctctgccaggcccagctgctggtctatgagaatgaggatgatcagaagtgtgtggagactgtggagctgggcagctatgagaagtgccaggaccttcgtgccctcctcaagcgaaaacaccgctttatcctgctgcgatccccagggaacaaggtcagcgacatcaaattccaggcacccaccggggaggagaaggaatcctggatcaaagccctcaatgaagggattaaccgaggcaaaaacaaggctttcgatgaggtaaaggtggacaagagctgcgccctggagcatgtgacacgggaccgggtgcgagggggccagcgacgccggccaccaacgagagtccacctgaaggaggtggccagtgcagcttctgacggtcttctgcgcctggatcttgatgttccggacagtgggccaccagtgtttgcccccagcaatcatgtcagtgaagcccaacctcgggagacaccccggcccctcatgcctcctaccaagcctttcctagcacctgagaccaccagccctgcccctcctcccacctattctgagtagctgcagaggccttgggtccaggctctaggttcatccctcagttggggggaacgtaggacccagctggagcctcttgagggagatgagaggcctctttgtgaggaggacattagctgtgtggcctctctctctttggccctgtttccttttttgcaaaacaaggacattttctgcagccccttcctctcagtgagctatgattggagggcttaggtctggaggattcaagagtggaagaggaatttaaggggtcccctagtctagtctctgcccctggatagtgtccagccttgtatatttctgaagaggtggatcccagagtggctctgatgtccacattagaaaaacttacttgtaatgatcatgtcagccttcagaagagaatccccaccaacttctgtgcctcctcagatggggatttatctggatctctgtggttccttctcagccgaaacaggtccagtatcccagtcatttcttcaaatgctgataggggtatgttggaatccgaagccacttccccgccttcaagccccagatgggctgctctcctgtaactttctaggagaagagacattttcttctttccctttcctggtccatccctgcaccctggtcctctcccagcctctcccccacattgtccctgactctaggggcacatccagtctccatcgtgctgcagcagctggactgagggcagagcctgtaggtgcagaggccctggctcccgaggtccagccactctccctggggcctctggggtgagagcagcttccgataggacctgcccagatttctgcatgtgcacttttgtttactgaaagagagaaaggggggggtcacagcaacatgccctggcctttctgctctgttccccaaccccactgaggcctgctgcacaggtcaatgccttcgttatcgttattgtactgtcactttgttcttgaggtagtagtcaaggatcaggaggggcagatgtcttctctgggctgcgtggggccggagcagaggtgagcagcaatgcactggttcgggagcccccatcagcctccttgtgcaaactgggcccccatgccacagtctggctttccctccatctgccccaggacaagagcaagaaggacatcagttgcccagtcatgtgatcccctgccatcttgccttaggaacagccttcccccaccagcagccatggctggctggggctttagccaagccacctactgccaggaattggagcctcagttccctcctgtgtcaagtagctaactgcagcagctggactgagggcagagtctgtgggtgcagagaccctgcatgtaggtcacaggttgaggcccagccactctccctggggcctggtgggtaggcaagtagctctggggccacctcaagtgaccaaatgctattaatttccatcctttagcaggctgggccctaggcaggaagctggcttctgggagaggagtgagaacgtgcagggcctgcctagcttgcgtgcttgaggaaggtggcattccgtgcttgcctccttgaggagggtggcattctgtgtcttctgcttatgaagcgcctttcttaaagtttggcaataaatccatttttatggaacttc

SEQ ID NO: 7711 - protein, 226 aa, Homo sapiens
MEEEGVKEAGEKPRGAQMVDKAGWIKKSSGGLLGFWKDRYLLLCQAQLLVYENEDDQKCVETVELGSYEKCQDLRALLKRKHRFILLRSPGNKVSDIKFQAPTGEEKESWIKALNEGINRGKNKAFDEVKVDKSCALEHVTRDRVRGGQRRRPPTRVHLKEVASAASDGLLRLDLDVPDSGPPVFAPSNHVSEAQPRETPRPLMPPTKPFLAPETTSPAPPPTYSE

SEQ ID NO: 7712 - DNA, 3719 bp, Homo sapiens
cttgggcccccggcagccggcgggacagaacgcggagagtcgccgcctggccgggcgtagacgcggtggcagagcccgcgcggcgctggaagcgagtggcggagcggcgggacctcggcggactcgccatggaggaggagggtgtgaaggaagccggtgagaagcctcggggagcacagatggtggacaaggctggctggatcaagaagagcagtgggggcctcctgggtttctggaaagaccgatatctgctcctctgccaggcccagctgctggtctatgagaatgaggatgatcagaagtgtgtggagactgtggagctgggcagctatgagaagtgccaggaccttcgtgccctcctcaagcgaaaacaccgctttatcctgctgcgatccccagggaacaaggtcagcgacatcaaattccaggcacccaccggggaggagaaggaatcctggatcaaagccctcaatgaagggattaaccgaggcaaaaacaaggctttcgatgaggtaaaggtggacaagagctgcgccctggagcatgtgacacgggaccgggtgcgagggggccagcgacgccggccaccaacgagagtccacctgaaggaggtggccagtgcagcttctgacggtcttctgcgcctggatcttgatgttccggacagtgggccaccagtgtttgcccccagcaatcatgtcagtgaagcccaacctcgggagacaccccggcccctcatgcctcctaccaagcctttcctagcacctgagaccaccagccctggtgacagggtggagacccctgtgggggagagagccccaacccctgtctcagcaagctctgaggtctcccctgagagccaagaggactcagagaccccagcagaggaggacagtggctctgagcagcctcccaacagcgtcctgcctgacaaactgaaggtgagctgggagaaccccagcccccaggaggcccctgctgcagagagtgcagaaccgtcccaggcaccctgttctgagacttctgaggctgcccccagggagggtgggaagccccctacacccccacccaagatcttatcagagaaactgaaagcctccatgggtgagatgcaggcttctgggccacctgctccaggcacagtgcaggtctcagtgaatggcatggatgacagtcctgagcctgccaagccctctcaggctgagggcaccccaggaactcctccaaaggatgcaacaacatccacagcactgcccccctgggacctgccacctcagttccatccccgctgctcctcccttggggacttgcttggggaaggcccgcggcatcccttgcagcccagggaacggctatatcgggcccagctggaggtgaaggtggcctcggaacagacggagaaactgttgaacaaggtgctgggcagtgagccggcccctgttagtgccgaaacattgctcagccaggctgtggagcagctgaggcaggccacccaggtcctgcaggaaatgagagatttgggagagctgagccaggaagcacctgggctaagggagaagcggaaggagctggtgaccctctacaggagaagtgcaccctagggccttctgggccagaggcaccatcccttctggccatccatcaagtccatcaaggcccagccctgctgagaaatgtgcttctgcttctacagcaatggctgcaggagggccattgggcatgtcagggtttggccatgacccgaagagactcctggcgtccttcctactctgctctggccagtggtgccaggtgccacccagggctactgcctggctatctggcctggcctctgggctggggctggggctgggagcacacacgctgggacctatgtgtttgtgtggtcgttccaaactgccccagggctttgggggcggcacttggggtttctgggaatgacatcatctctgttccccatccccagtagtttacattcctgacttctgaatacagcacagctgagccccctgcagctcccatctccagctattcctaggcaaagagcctcatggctaaggcagcctcaaagccagcccctcctcccacctattctgagtagctgcagaggccttgggtccaggctctaggttcatccctcagttggggggaacgtaggacccagctggagcctcttgagggagatgagaggcctctttgtgaggaggacattagctgtgtggcctctctctctttggccctgtttccttttttgcaaaacaaggacattttctgcagccccttcctctcagtgagctatgattggagggcttaggtctggaggattcaagagtggaagaggaatttaaggggtcccctagtctagtctctgcccctggatagtgtccagccttgtatatttctgaagaggtggatcccagagtggctctgatgtccacattagaaaaacttacttgtaatgatcatgtcagccttcagaagagaatccccaccaacttctgtgcctcctcagatggggatttatctggatctctgtggttccttctcagccgaaacaggtccagtatcccagtcatttcttcaaatgctgataggggtatgttggaatccgaagccacttccccgccttcaagccccagatgggctgctctcctgtaactttctaggagaagagacattttcttctttccctttcctggtccatccctgcaccctggtcctctcccagcctctcccccacattgtccctgactctaggggcacatccagtctccatcgtgctgcagcagctggactgagggcagagcctgtaggtgcagaggccctggctcccgaggtccagccactctccctggggcctctggggtgagagcagcttccgataggacctgcccagatttctgcatgtgcacttttgtttactgaaagagagaaaggggggggtcacagcaacatgccctggcctttctgctctgttccccaaccccactgaggcctgctgcacaggtcaatgccttcgttatcgttattgtactgtcactttgttcttgaggtagtagtcaaggatcaggaggggcagatgtcttctctgggctgcgtggggccggagcagaggtgagcagcaatgcactggttcgggagcccccatcagcctccttgtgcaaactgggcccccatgccacagtctggctttccctccatctgccccaggacaagagcaagaaggacatcagttgcccagtcatgtgatcccctgccatcttgccttaggaacagccttcccccaccagcagccatggctggctggggctttagccaagccacctactgccaggaattggagcctcagttccctcctgtgtcaagtagctaactgcagcagctggactgagggcagagtctgtgggtgcagagaccctgcatgtaggtcacaggttgaggcccagccactctccctggggcctggtgggtaggcaagtagctctggggccacctcaagtgaccaaatgctattaatttccatcctttagcaggctgggccctaggcaggaagctggcttctgggagaggagtgagaacgtgcagggcctgcctagcttgcgtgcttgaggaaggtggcattccgtgcttgcctccttgaggagggtggcattctgtgtcttctgcttatgaagcgcctttcttaaagtttggcaataaatccatttttatggaacttc

SEQ ID NO: 7713 - protein, 490 aa, Homo sapiens; identical to SEQ ID NO: 1064

SEQ ID NO: 7714 - DNA, 3536 bp, Homo sapiens
ggagagtcgccgcctggccgggcgtagacgcggtggcagagcccgcgcggcgctggaagcgagtggcggagcggcgggacctcggcggactcgccatggaggaggaggatgatcagaagtgtgtggagactgtggagctgggcagctatgagaagtgccaggaccttcgtgccctcctcaagcgaaaacaccgctttatcctgctgcgatccccagggaacaaggtcagcgacatcaaattccaggcacccaccggggaggagaaggaatcctggatcaaagccctcaatgaagggattaaccgaggcaaaaacaaggctttcgatgaggtaaaggtggacaagagctgcgccctggagcatgtgacacgggaccgggtgcgagggggccagcgacgccggccaccaacgagagtccacctgaaggaggtggccagtgcagcttctgacggtcttctgcgcctggatcttgatgttccggacagtgggccaccagtgtttgcccccagcaatcatgtcagtgaagcccaacctcgggagacaccccggcccctcatgcctcctaccaagcctttcctagcacctgagaccaccagccctggtgacagggtggagacccctgtgggggagagagccccaacccctgtctcagcaagctctgaggtctcccctgagagccaagaggactcagagaccccagcagaggaggacagtggctctgagcagcctcccaacagcgtcctgcctgacaaactgaaggtgagctgggagaaccccagcccccaggaggcccctgctgcagagagtgcagaaccgtcccaggcaccctgttctgagacttctgaggctgcccccagggagggtgggaagccccctacacccccacccaagatcttatcagagaaactgaaagcctccatgggtgagatgcaggcttctgggccacctgctccaggcacagtgcaggtctcagtgaatggcatggatgacagtcctgagcctgccaagccctctcaggctgagggcaccccaggaactcctccaaaggatgcaacaacatccacagcactgcccccctgggacctgccacctcagttccatccccgctgctcctcccttggggacttgcttggggaaggcccgcggcatcccttgcagcccagggaacggctatatcgggcccagctggaggtgaaggtggcctcggaacagacggagaaactgttgaacaaggtgctgggcagtgagccggcccctgttagtgccgaaacattgctcagccaggctgtggagcagctgaggcaggccacccaggtcctgcaggaaatgagagatttgggagagctgagccaggaagcacctgggctaagggagaagcggaaggagctggtgaccctctacaggagaagtgcaccctagggccttctgggccagaggcaccatcccttctggccatccatcaagtccatcaaggcccagccctgctgagaaatgtgcttctgcttctacagcaatggctgcaggagggccattgggcatgtcagggtttggccatgacccgaagagactcctggcgtccttcctactctgctctggccagtggtgccaggtgccacccagggctactgcctggctatctggcctggcctctgggctggggctggggctgggagcacacacgctgggacctatgtgtttgtgtggtcgttccaaactgccccagggctttgggggcggcacttggggtttctgggaatgacatcatctctgttccccatccccagtagtttacattcctgacttctgaatacagcacagctgagccccctgcagctcccatctccagctattcctaggcaaagagcctcatggctaaggcagcctcaaagccagcccctcctcccacctattctgagtagctgcagaggccttgggtccaggctctaggttcatccctcagttggggggaacgtaggacccagctggagcctcttgagggagatgagaggcctctttgtgaggaggacattagctgtgtggcctctctctctttggccctgtttccttttttgcaaaacaaggacattttctgcagccccttcctctcagtgagctatgattggagggcttaggtctggaggattcaagagtggaagaggaatttaaggggtcccctagtctagtctctgcccctggatagtgtccagccttgtatatttctgaagaggtggatcccagagtggctctgatgtccacattagaaaaacttacttgtaatgatcatgtcagccttcagaagagaatccccaccaacttctgtgcctcctcagatggggatttatctggatctctgtggttccttctcagccgaaacaggtccagtatcccagtcatttcttcaaatgctgataggggtatgttggaatccgaagccacttccccgccttcaagccccagatgggctgctctcctgtaactttctaggagaagagacattttcttctttccctttcctggtccatccctgcaccctggtcctctcccagcctctcccccacattgtccctgactctaggggcacatccagtctccatcgtgctgcagcagctggactgagggcagagcctgtaggtgcagaggccctggctcccgaggtccagccactctccctggggcctctggggtgagagcagcttccgataggacctgcccagatttctgcatgtgcacttttgtttactgaaagagagaaaggggggggtcacagcaacatgccctggcctttctgctctgttccccaaccccactgaggcctgctgcacaggtcaatgccttcgttatcgttattgtactgtcactttgttcttgaggtagtagtcaaggatcaggaggggcagatgtcttctctgggctgcgtggggccggagcagaggtgagcagcaatgcactggttcgggagcccccatcagcctccttgtgcaaactgggcccccatgccacagtctggctttccctccatctgccccaggacaagagcaagaaggacatcagttgcccagtcatgtgatcccctgccatcttgccttaggaacagccttcccccaccagcagccatggctggctggggctttagccaagccacctactgccaggaattggagcctcagttccctcctgtgtcaagtagctaactgcagcagctggactgagggcagagtctgtgggtgcagagaccctgcatgtaggtcacaggttgaggcccagccactctccctggggcctggtgggtaggcaagtagctctggggccacctcaagtgaccaaatgctattaatttccatcctttagcaggctgggccctaggcaggaagctggcttctgggagaggagtgagaacgtgcagggcctgcctagcttgcgtgcttgaggaaggtggcattccgtgcttgcctccttgaggagggtggcattctgtgtcttctgcttatgaagcgcctttcttaaagtttggcaataaatccatttttatggaacttc

SEQ ID NO: 7715 - protein, 440 aa, Homo sapiens
MEEEDDQKCVETVELGSYEKCQDLRALLKRKHRFILLRSPGNKVSDIKFQAPTGEEKESWIKALNEGINRGKNKAFDEVKVDKSCALEHVTRDRVRGGQRRRPPTRVHLKEVASAASDGLLRLDLDVPDSGPPVFAPSNHVSEAQPRETPRPLMPPTKPFLAPETTSPGDRVETPVGERAPTPVSASSEVSPESQEDSETPAEEDSGSEQPPNSVLPDKLKVSWENPSPQEAPAAESAEPSQAPCSETSEAAPREGGKPPTPPPKILSEKLKASMGEMQASGPPAPGTVQVSVNGMDDSPEPAKPSQAEGTPGTPPKDATTSTALPPWDLPPQFHPRCSSLGDLLGEGPRHPLQPRERLYRAQLEVKVASEQTEKLLNKVLGSEPAPVSAETLLSQAVEQLRQATQVLQEMRDLGELSQEAPGLREKRKELVTLYRRSAP

SEQ ID NO: 7716 - DNA, 376 bp, Homo sapiens
agattgggggttctgggacaggggcaaagtgagggcattcaagttagtaggaggaccctgggtctggggccagaagacctgctctacttttgccatgctgtgcaaccttgagcgagtacctaatcctctcttgggtctctgtatatggggataatacctccgaggacaaatctagggtttctagatgagagttcttttcttatttttttaaacttaattcttttttttttggtgatggagtcttgctctgtcaccaggctggagttgcagtgagccgagatcatgccattgcactccagcctggacaacaagagtgaaactccatctcaaaaaaacaaaaaaataataagtagcactcgtacttgtttggagatat

SEQ ID NO: 7717 - protein, 42 aa, Homo sapiens [sequence omitted]

SEQ ID NO: 7718 - DNA, 1525 bp, Homo sapiens
aagccagcccctcctcccacctattctgagtagctgcagaggccttgggtccaggctctaggttcatccctcagttggggggaacgtaggacccagctggagcctcttgagggagatgagaggcctctttgtgaggaggacattagctgtgtggcctctctctctttggccctgtttccttttttgcaaaacaaggacattttctgcagccccttcctctcagtgagctatgattggagggcttaggtctggaggattcaagagtggaagaggaatttaaggggtcccctagtctagtctctgcccctggatagtgtccagccttgtatatttctgaagaggtggatcccagagtggctctgatgtccacattagaaaaacttacttgtaatgatcatgtcagccttcagaagagaatccccaccaacttctgtgcctcctcagatggggatttatctggatctctgtggttccttctcagccgaaacaggtccagtatcccagtcatttcttcaaatgctgataggggtatgttggaatccgaagccacttccccgccttcaagccccagatgggctgctctcctgtaactttctaggagaagagacattttcttctttccctttcctggtccatccctgcaccctggtcctctcccagcctctcccccacattgtccctgactctaggggcacatccagtctccatcgtgctgcagcagctggactgagggcagagcctgtaggtgcagaggccctggctcccgaggtccagccactctccctggggcctctggggtgagagcagcttccgataggacctgcccagatttctgcatgtgcacttttgtttactgaaagagagaaaggggggggtcacagcaacatgccctggcctttctgctctgttccccaaccccactgaggcctgctgcacaggtcaatgccttcgttatcgttattgtactgtcactttgttcttgaggtagtagtcaaggatcaggaggggcagatgtcttctctgggctgcgtggggccggagcagaggtgagcagcaatgcactggttcgggagcccccatcagcctccttgtgcaaactgggcccccatgccacagtctggctttccctccatctgccccaggacaagagcaagaaggacatcagttgcccagtcatgtgatcccctgccatcttgccttaggaacagccttcccccaccagcagccatggctggctggggctttagcccagccactctccctggggcctggtgggtaggcaagtagctctggggccacctcaagtgaccaaatgctattaatttccatcctttagcaggctgggccctaggcaggaagctggcttctgggagaggagtgagaacgtgcagggcctgcctagcttgcgtgcttgaggaaggtggcattccgtgcttgcctccttgaggagggtggcattctgtgtcttctgcttatgaagcgcctttcttaaagtttggcaataaatccatttttatggaacttc

SEQ ID NO: 7719 - protein, 76 aa, Homo sapiens
MHWFGSPHQPPCANWAPMPQSGFPSICPRTRARRTSVAQSCDPLPSCLRNSLPPPAAMAGWGFSPATLPGAWWVGK

SEQ ID NO: 7720 - DNA, 850 bp, Homo sapiens
aggggcacatccagtctccatcgtgctgcagcagctggactgagggcagagcctgtaggtgcagaggccctggctcccgaggtccagccactctccctggggcctctggggtgagagcagcttccgataggacctgcccagatttctgcatgtgcacttttgtttactgaaagagagaaaggggggggtcacagcaacatgccctggcctttctgctctgttccccaaccccactgaggcctgctgcacaggtcaatgccttcgttatcgttattgtactgtcactttgttcttgaggtagtagtcaaggatcaggaggggcagatgtcttctctgggctgcgtggggccggagcagaggtgagcagcaatgcactggttcgggagcccccatcagcctccttgtgcaaactgggcccccatgccacagtctggctttccctccatctgccccaggacaagagcaagaaggacatcagttgcccagtcatgtgatcccctgccatcttgccttaggaacagccttcccccaccagcagccatggctggctggggctttagccaagccacctactgccaggaattggagcctcagttccctcctgtgtcaagtagctaactgcagcagctggactgagggcagagtctgtgggtgcagagaccctgcatgctgggccctaggcaggaagctggcttctgggagaggagtgagaacgtgcagggcctgcctagcttgcgtgcttgaggaaggtggcattccgtgcttgcctccttgaggagggtggcattctgtgtcttctgcttatgaagcgcctttcttaaagtttggcaataaatccatttttatggaa

SEQ ID NO: 7721 - protein, 82 aa, Homo sapiens
MHWFGSPHQPPCANWAPMPQSGFPSICPRTRARRTSVAQSCDPLPSCLRNSLPPPAAMAGWGFSQATYCQELEPQFPPVSSS

SEQ ID NO: 7722 - DNA, 850 bp, Homo sapiens
ggggcacatccagtctccatcgtgctgcagcagctggactgagggcagagcctgtaggtgcagaggccctggctcccgaggtccagccactctccctggggcctctggggtgagagcagcttccgataggacctgcccagatttctgcatgtgcacttttgtttactgaaagagagaaaggggggggtcacagcaacatgccctggcctttctgctctgttccccaaccccactgaggcctgctgcacaggtcaatgccttcgttatcgttattgtactgtcactttgttcttgaggtagtagtcaaggatcaggaggggcagatgtcttctctgggctgcgtggggccggagcagaggtgagcagcaatgcactggttcgggagcccccatcagcctccttgtgcaaactgggcccccatgccacagtctggctttccctccatctgccccaggacaagagcaagaaggacatcagttgcccagtcatgtgatcccctgccatcttgccttaggaacagccttcccccaccagcagccatggctggctggggctttagccaagccacctactgccaggaattggagcctcagttccctcctgtgcaagtagctctggggccacctcaagtgaccaaatgctattaatttccatcctttagcaggctgggccctaggcaggaagctggcttctgggagaggagtgagaacgtgcagggcctgcctagcttgcgtgcttgaggaaggtggcattccgtgcttgcctccttgaggagggtggcattctgtgtcttctgcttatgaagcgcctttcttaaagtttggcaataaatccatttttatggaacttc

SEQ ID NO: 7723 - protein, 92 aa, Homo sapiens
MHWFGSPHQPPCANWAPMPQSGFPSICPRTRARRTSVAQSCDPLPSCLRNSLPPPAAMAGWGFSQATYCQELEPQFPPVQVALGPPQVTKCY

SEQ ID NO: 7724 - DNA, 987 bp, Homo sapiens
gccacaccctctccccacccgccatcccccatgtgggaaagcacgactgtgctcaccaaagcccagctcccttcctcctcctctgtgagaaccatggacagaccccggggccaacacaacaggaaacacctggcctttttttttgagactgagtctctgtcgcccaggctggagtgcagtggtgtgatcttggctcactgcaacctccgcctcctgggttcaagcgattcttccgcctcagcctcccgagtagctgggattacagttgcctgccatcacacctggctgatttttgtattttttgtagagacggggtttcactatgttggccaggttggtctcgaactactgatctcaggtgatccacccacactggcatcccaaagtgctgggattataggcgtgagccatggagcccggctaggatatgtacatattttttaattaagacggagtctcggtctgtcatccaggctggagtgcagtggtgtgatctcagctcatggcaacctccgcctcctgggttcaagcaattctcctgcctcagcctcctgagagctgggactacaggcgtgcgctaccacgcctggctaatttttgtatttttagtagagatggagtttcaccatgttggccaggctggtctcgaacttctgaccatgagtgatctgcccgccttggcctaccaaagtgcttgggattacatgcgtgagccaccgtgtccagcccagtagagggtttcacaaatcacaaggtggctatcatcagacaggacccaggacagggggaggggcaaccagattgccccttcctctacccctgcctaggccctggcggcatcctgtctcgggagtcactgtgttttgttcccttctccctgtcttgtcttcctgcctccccacccctaccctcatgtcccagacaaaaggggtgtcagaaaagacaaactcactccacagaggtttctgtgaccaaggaggctctgtg

SEQ ID NO: 7725 - protein, 137 aa, Homo sapiens
MWESTTVLTKAQLPSSSSVRTMDRPRGQHNRKHLAFFFETESLSPRLECSGVILAHCNLRLLGSSDSSASASRVAGITVACHHTWLIFVFFVETGFHYVGQVGLELLISGDPPTLASQSAGIIGVSHGARLGYVHIF

SEQ ID NO: 7726 - DNA, 728 bp, Homo sapiens
gcattttgaaatatacaagatattcaacaagaaagagcgaaactccgtctcaaataaacaaataaataggccgggcgcggtggctcacgcctgtaatcccagcactttgggaggccgaggcaggcagatcatgaggtcagaagatcaagaccatcctggctaacatggtgaaaccccatctctactaaaaatacaaaaaattagccgggcgtggtgatgggtacctgtagtcccagctacttgggaggctgaggcaggagaatggcgtgaacctgggaggcggagcttgcagtgagccgagatcgtgccactgcactccagcctgggcaacagagcgagactccgtctcaaaaaataaataaataaacaaataaataaataaaaatagtgctgagctcggaggcaggtgggaactacttttgtctctagactcattgaatgtgacccaggtagtccttggtcagtctaatagggaattctgtgtcagtcaaatttcagctagaccctcctcctgtcccctcaagacccagttaagattggctccagaaaatttttaaaaagtggccctagactattcaataaatagagttagaaatttggttacccgttcgaaaaagaaaaaagaaatctttacctcacactatccacaaaaaatcaactctagatggatcaataactcaaaaagttaaagttaaaacctttaggccaggcacagtggcctatacctg

SEQ ID NO: 7727 - protein, 60 aa, Homo sapiens
INKNSAELGGRWELLLSLDSLNVTQVVLGQSNREFCVSQISARPSSCPLKTQLRLAPENF

SEQ ID NO: 7728 - DNA, 703 bp, Homo sapiens
agcgcgcgcaggggctgcggagcggcaggatgcaggaggagctggcgtgggagaccgacggcctttgggatgaatgcgcttctcctgtctgcctggttcggccacttacgaatcctccagatcttggtaaactcaggggccaagatccactgtgagagcaaggaggggaacactgcccttcatctggctgctggtcggggccatatggctgtgctgcagcgacttgtggacatcgggctggacctggaggagcagaatgcggaaggtctgactgccctgcattcggctgctggaggatcccaccctgactgtgtgcagctcctcctcagggctgggagcaccgtgaatgccctcacccaggtagccaggccctcccaagactgcggtcggctcttggctgctgagccatagccatgtcggcagtaacggccacagggattcctgaaccctgagtgaatagaggcttcgaggcagcagacaaggttctgatcttggcttctccactgctgagccctgtgacctggagcaagttacttaacctctctgagccttgtttcccaactataaagtgcagtgacatttacttttttacattgttgtgaggattaaatacctaacacagtgcccaggacataatagggcccaacacctcaatacctgttagtgtttttttgttttaatttttttgagatgggtcttactc

SEQ ID NO: 7729 - protein, 113 aa, Homo sapiens
MNALLLSAWFGHLRILQILVNSGAKIHCESKEGNTALHLAAGRGHMAVLQRLVDIGLDLEEQNAEGLTALHSAAGGSHPDCVQLLLRAGSTVNALTQVARPSQDCGRLLAAEP

SEQ ID NO: 7730 - DNA, 2379 bp, Homo sapiens
agcgcgcgcaggggctgcggagcggcaggatgcaggaggagctggcgtgggagaccgacggccgctggagtgcactggcatgatctcggctcactgcaacctccagctcccaggttgaagcaattctcctgcctcagccttccgagtagctgggactacagtgcttcctctggagaggcagctccacgaggccgcccgccagaacaatgtcggcaggatgcaggagctgattgggaggagggttaacaccagggccagaaaccacgtgggcagggtggccctgcactgggctgcaggtgcagggcacgagcaggctgtgcgtctgcttctggagcacgaggctgctgtggacgaggaggatgcggtaggggccctcacagaggcacgtctgtgtgcccttggtcctctccttgccttggccccagcctctgcttccctcctctctccagtgctgtccttgtctgcaccacccgcctcctgcctccaaattcccgcctgtttctaaagcaaagcagtgcaactctctttggatgctcgggagcctgctgatcatttgggatgaatgcgcttctcctgtctgcctggttcggccacttacgaatcctccagatcttggtaaactcaggggccaagatccactgtgagagcaaggatggcctgaccttactgcactgcgcagcccaaaaaggccatgtgcctgtgctggcgttcataatggaggacctggaggatgtggccctggaccacgtagacaagctggggaggacggcgtttcacagggcagctgagcacgggcagctggatgctctggacttcctcgtgggctctggctgtgaccacaatgtcaaagacaaggaggggaacactgcccttcatctggctgctggtcggggccatatggctgtgctgcagcgacttgtggacatcgggctggacctggaggagcagaatgcggaaggtctgactgccctgcattcggctgctggaggatcccaccctgactgtgtgcagctcctcctcagggctgggagcaccgtgaatgccctcacccaggtagccaggccctcccaagactgcggtcggctcttggctgctgagccatagccatgtcggcagtaacggccacagggattcctgaaccctgagtgaatagaggcttcgaggcagcagacaaggttctgatcttggcttctccactgctgagccctgtgacctggagcaagttacttaacctctctgagccttgtttcccaactataaagtgcagtgacatttacttttttacattgttgtgaggattaaatacctaacacagtgcccaggacataatagggcccaacacctcaatacctgttagtgtttttttgttttaatttttttgagatgggtcttactctgtcgcccaggctgaagtgcaatggtgcgatcttggctcactgtaacctccgcctcctgggttcaagcagttttcctgactcagcctcccaagaggctgggactacaggtgtgtgccactacccccggctcatttttgtattttttgggtagagacagggtttcaccatgttggccaggctggtcttgaactcctgacctcaagtgatccacctgcctcagccttccaaagtgttgggattataggcgggatagccattgcacctggccctgttagtgtcttctatttgttgagctcttgatcgttcacaaagccccttcataactgttaccccagaaaaattccacccattttgcagatgagaaaactggagctttgagggcactttctcagggtcacaagctagtacgaggcaaagctgagtctcaaaagccttttcccctgactccagagctcccacccactgatgaagcttttcccctgacagagctggggcttgaggtgtgaccctggatgaacctcttctctctctccccgttgtactcatcagttctgccagtaaaaattctcctctatgacctggaaagcggggttgtggcctttctttaggtagtgagttggtgttttgggtttgctttttatttttgaatcagtgacaaataacctttctggctggttgaatggcttcaggttctggaattcttgctttgttctaaatgtcaatagtatagcagaaatattaataataaataatacaatataaataataatagcaaaaacacacaggcagttcaaaaacagagaattaaaatgttatgctaaaaaatatttatttccccactgcttaatttgactggctttgaaaagaaaagtaggctgggcaaggtggctcatgcctgtaacacagcactttgggaggccaaagctggaatattgcttgagcccaggagtttgaggctgcagtgagctatgattgcaccact

SEQ ID NO: 7731 - protein, 181 aa, Homo sapiens
MNALLLSAWFGHLRILQILVNSGAKIHCESKDGLTLLHCAAQKGHVPVLAFIMEDLEDVALDHVDKLGRTAFHRAAEHGQLDALDFLVGSGCDHNVKDKEGNTALHLAAGRGHMAVLQRLVDIGLDLEEQNAEGLTALHSAAGGSHPDCVQLLLRAGSTVNALTQVARPSQDCGRLLAAEP

SEQ ID NO: 7732 - DNA, 1474 bp, Homo sapiens
gcggagcggcaggatgcaggaggagctggcgtgggagaccgacggcctttgggatgaatgcgcttctcctgtctgcctggttcggccacttacgaatcctccagatcttggtaaactcaggggccaagatccactgtgagagcaaggatggcctgaccttactgcactgcgcagcccaaaaaggccatgtgcctgtgctggcgttcataatggaggacctggaggatgtggccctggaccacgtagacaagctggggaggacggcgtttcacagggcagctgagcacgggcagctggatgctctggacttcctcgtgggctctggctgtgaccacaatgtcaaagacaaggaggggaacactgcccttcatctggctgctggtcggggccatatggctgtgctgcagcgacttgtggacatcgggctggacctggaggagcagaatgcggaaggtctgactgccctgcattcggctgctggaggatcccaccctgactgtgtgcagctcctcctcagggctgggagcaccgtgaatgccctcacccaggtagccaggccctcccaagactgcggtcggctcttggctgctgagccatagccatgtcggcagtaacggccacagggattcctgaaccctgagtgaatagaggcttcgaggcagcagacaaggttctgatcttggcttctccactgctgagccctgtgacctggagcaagttacttaacctctctgagccttgtttcccaactataaagtgcagtgacatttacttttttacattgttgtgaggattaaatacctaacacagtgcccaggacataatagggcccaacacctcaatacctgttagtgtttttttgttttaatttttttgagatgggtcttactctgtcgcccaggctgaagtgcaatggtgcgatcttggctcactgtaacctccgcctcctgggttcaagcagttttcctgactcagcctcccaagaggctgggactacaggtgtgtgccactacccccggctcatttttgtattttttgggtagagacagggtttcaccatgttggccaggctggtcttgaactcctgacctcaagtgatccacctgcctcagccttccaaagtgttgggattataggcgggatagccattgcacctggccctgttagtgtcttctatttgttgagctcttgatcgttcacaaagccccttcataactgttaccccagaaaaattccacccattttgcagatgagaaaactggagctttgagggcactttctcagggtcacaagctagtacgaggcaaagctgagtctcaaaagccttttcccctgactccagagctcccacccactgatgaagcttttcccctgacagagctggggcttgaggtgtgaccctggatgaacctcttctctctctccccgttgtactcatcagttctgccagtaaaaattctcctctatgacctgg

SEQ ID NO: 7733 - protein, 181 aa, Homo sapiens; identical to SEQ ID NO: 7731

SEQ ID NO: 7734 - DNA, 1278 bp, Homo sapiens
attgggaggagggttaacaccagggccagaaaccacgtgggcagggtggccctgcactgggctgcaggtgcagggcacgagcaggctgtgcgtctgcttctggagcacgaggctgctgtggacgaggaggatgcggtaggggccctcacagaggcacgggaacactgcccttcatctggctgctggtcggggccatatggctgtgctgcagcgacttgtggacatcgggctggacctggaggagcagaatgcggaaggtctgactgccctgcattcggctgctggaggatcccaccctgactgtgtgcagctcctcctcagggctgggagcaccgtgaatgccctcacccaggtagccaggccctcccaagactgcggtcggctcttggctgctgagccatagccatgtcggcagtaacggccacagggattcctgaaccctgagtgaatagaggcttcgaggcagcagacaaggttctgatcttggcttctccactgctgagccctgtgacctggagcaagttacttaacctctctgagccttgtttcccaactataaagtgcagtgacatttacttttttacattgttgtgaggattaaatacctaacacagtgcccaggacataatagggcccaacacctcaatacctgttagtgtttttttgttttaatttttttgagatgggtcttactctgtcgcccaggctgaagtgcaatggtgcgatcttggctcactgtaacctccgcctcctgggttcaagcagttttcctgactcagcctcccaagaggctgggactacaggtgtgtgccactacccccggctcatttttgtattttttgggtagagacagggtttcaccatgttggccaggctggtcttgaactcctgacctcaagtgatccacctgcctcagccttccaaagtgttgggattataggcgggatagccattgcacctggccctgttagtgtcttctatttgttgagctcttgatcgttcacaaagccccttcataactgttaccccagaaaaattccacccattttgcagatgagaaaactggagctttgagggcactttctcagggtcacaagctagtacgaggcaaagctgagtctcaaaagccttttcccctgactccagagctcccacccactgatgaagcttttcccctgacagagctggggcttgaggtgtgaccctggatgaacctcttctctctctccccgttgtactcatcagttctgccagtaaaaattctcctctatgacctgg

SEQ ID NO: 7735 - protein, 68 aa, Homo sapiens
MAVLQRLVDIGLDLEEQNAEGLTALHSAAGGSHPDCVQLLLRAGSTVNALTQVARPSQDCGRLLAAEP

SEQ ID NO: 7736 - DNA, 2813 bp, Homo sapiens
ggatgaatgcgcttctcctgtctgcctggttcggccacttacgaatcctccagatcttggtaaactcaggggccaagatccactgtgagagcaaggatggcctgaccttactgcactgcgcagcccaaaaaggccatgtgcctgtgctggcgttcataatggaggacctggaggatgtggccctggaccacgtagacaagctggggaggacggcgtttcacagggcagctgagcacgggcagctggatgctctggacttcctcgtgggctctggctgtgaccacaatgtcaaagacaaggaggggaacactgcccttcatctggctgctggtcggggccatatggctgtgctgcagcgacttgtggacatcgggctggacctggaggagcagaatgcggaaggtctgactgccctgcattcggctgctggaggatcccaccctgactgtgtgcagctcctcctcagggctgggagcaccgtgaatgccctcacccagaaaaacctaagctgccttcactatgcagccctcagtggctcggaggatgtgtctcgggtcctcatccacgcaggaggctgcgccaacgtggttgatcatcagggtgcctctcctctgcacctcgctgtgaggcacaacttccctgccttggtccggctcctcatcaactccgacagtgacgtgaatgccgtggacaataggcagcagacgccccttcacctggctgcagagcacgcctggcaggacatagcagatatgctcctcattgctggggttgacttaaacctgagagataagcagggaaaaaccgccctggcagtggctgtccgcagcaaccatgtcagcctggtggacatgatcataaaagctgatcgtttctacagatgggagaaggaccaccccagtgatccctctgggaagagcttgtcctttaagcaggaccatcggcaggaaacacagcagctccgttctgtgctgtggcggctggcctccaggtatctgcagccccgtgagtggaagaagctggcatattcctgggagttcacggaggcacatgtcgacgccatcgagcaacagtggacaggcaccaggagctatcaggagcacggccaccgaatgctgctcatttggctgcatggcgtggccacggctggtgagaaccccagcaaagcgctgttcgagggcctcgtggccattggcaggagggacctggctggctggagtacaatggcgagatctcagctcacggcaacctccgcctcccgggttcaaatgattctcgtgcctcagcctcccgagtagctgggattacaggtgcatgccatcacagctggctaatttttgtatttttagtagagatggggtttggccatgatggccaggctggaaaattgaaacataatttcacaattattcctttttccaccttaaataataagagtagaatactttctgtgtttttatcttatacacatgaataaatgctatggcttatcacagttacaatgtgttttctgaaagtaaagattattttaccttgaaattacaaaaattattttcagttttccaaaattctatcatctttaaacctaaataattcaatttcatggatgcacaaatgtttattgagagtctcatattcatgcttttcttcacagcactataaagttggacttggaaaatttggacagccatttgccattgtaatttttattcttttttctcctgattatttgacaaaacttgtatccacattgtagctgttcatgtgtctgcttctattgcatattgtaaaattattaactacttcccaaaatagtatttctctcagcagatatttctttggtactaccatgtattgtgtaacttttgggaaagtaaggtggcttccctgctctcagtgaagcattttattaaaagaataattataattaaaaaaacacgatacagatcagtgcatatagtatattactaatagtatgctgttaattgtgtaagaaagaaaggaaattagaaaacatatttgcataaataaaagctagacaaaggctaagaaactaatcaggtggtttccctggggtagtaggataatggggaacagtggggctgggaccgggtgggagaaagagttctcagtggttcctttctatacagttttaacttttgaaatgtgtgagagtgttacttactgaaaactgaaaggatatgacatgctggaacaggcaaaactacaaagacagtaaaaagatcagtgatttccaggagctgcaagggcagtgagaggaagggagggatgaggaggtggagtgcaggggatgttagggcagtgaaaggttctgtatgacactgtgatggtgggtacatgacattgggcattggtcaaaacccatagcatgtacagcacaaagcgtttgctctaatgtgagctatggactttagttaatagtaacgtgtcaatattggttcatcagttgtatcaaatgtaccacactgatgccagatgttaataatcggggaaactgtgtgtgctgaagagtacgtgggagctctctgtgctatctgctcaatttttctctaaacctaaaactgttctaaaatagaaagtctgtgaaaaaaaacaaaagtaaagttataaaaggaaaagaaaacagaggctttaaattaaatcatctattccttgggaaaggtattttgtaccatatgggactgaaatcatttctctggatgaattttataaaatgaattttgtaatttttttctgagaaaaaaaagttcttaaatacaataaaattgaaatgttgaaatatatctctcaaa

SEQ ID NO: 7737 - protein, 431 aa, Homo sapiens
MNALLLSAWFGHLRILQILVNSGAKIHCESKDGLTLLHCAAQKGHVPVLAFIMEDLEDVALDHVDKLGRTAFHRAAEHGQLDALDFLVGSGCDHNVKDKEGNTALHLAAGRGHMAVLQRLVDIGLDLEEQNAEGLTALHSAAGGSHPDCVQLLLRAGSTVNALTQKNLSCLHYAALSGSEDVSRVLIHAGGCANVVDHQGASPLHLAVRHNFPALVRLLINSDSDVNAVDNRQQTPLHLAAEHAWQDIADMLLIAGVDLNLRDKQGKTALAVAVRSNHVSLVDMIIKADRFYRWEKDHPSDPSGKSLSFKQDHRQETQQLRSVLWRLASRYLQPREWKKLAYSWEFTEAHVDAIEQQWTGTRSYQEHGHRMLLIWLHGVATAGENPSKALFEGLVAIGRRDLAGWSTMARSQLTATSASRVQMILVPQPPE

SEQ ID NO: 7738 - DNA, 3093 bp, Homo sapiens
ggatgaatgcgcttctcctgtctgcctggttcggccacttacgaatcctccagatcttggtaaactcaggggccaagatccactgtgagagcaaggatggcctgaccttactgcactgcgcagcccaaaaaggccatgtgcctgtgctggcgttcataatggaggacctggaggatgtggccctggaccacgtagacaagctggggaggacggcgtttcacagggcagctgagcacgggcagctggatgctctggacttcctcgtgggctctggctgtgaccacaatgtcaaagacaaggaggggaacactgcccttcatctggctgctggtcggggccatatggctgtgctgcagcgacttgtggacatcgggctggacctggaggagcagaatgcggaaggtctgactgccctgcattcggctgctggaggatcccaccctgactgtgtgcagctcctcctcagggctgggagcaccgtgaatgccctcacccagaaaaacctaagctgccttcactatgcagccctcagtggctcggaggatgtgtctcgggtcctcatccacgcaggaggctgcgccaacgtggttgatcatcagggtgcctctcctctgcacctcgctgtgaggcacaacttccctgccttggtccggctcctcatcaactccgacagtgacgtgaatgccgtggacaataggcagcagacgccccttcacctggctgcagagcacgcctggcaggacatagcagatatgctcctcattgctggggttgacttaaacctgagagataagcagggaaaaaccgccctggcagtggctgtccgcagcaaccatgtcagcctggtggacatgatcataaaagctgatcgtttctacagatgggagaaggaccaccccagtgatccctctgggaagagcttgtcctttaagcaggaccatcggcaggaaacacagcagctccgttctgtgctgtggcggctggcctccaggtatctgcagccccgtgagtggaagaagctggcatattcctgggagttcacggaggcacatgtcgacgccatcgagcaacagtggacaggcaccaggagctatcaggagcacggccaccgaatgctgctcatttggctgcatggcgtggccacggctggtgagaaccccagcaaagcgctgttcgagggcctcgtggccattggcaggagggacctggctgaaaatatcaggaagaaagcaaacgcagccccgagtgcccccaggaggtgcacagccatgtaaccggaggggccagaccttcaggcacgtgggacctcagcgtgtggagccacctgaacagaagatgaccatcatttaagggctttttaaaaaatcactgttaacagacctccaggtgattctactgaaatgcacagtcatgcagagcccaggaggcaaatgtttgtacactgatctttttcatgaggatgggtccaagggcctgtaatcccgtccaacaggctggagtacaatggcgagatctcagctcacggcaacctccgcctcccgggttcaaatgattctcgtgcctcagcctcccgagtagctgggattacaggtgcatgccatcacagctggctaatttttgtatttttagtagagatggggtttggccatgatggccaggctggaaaattgaaacataatttcacaattattcctttttccaccttaaataataagagtagaatactttctgtgtttttatcttatacacatgaataaatgctatggcttatcacagttacaatgtgttttctgaaagtaaagattattttaccttgaaattacaaaaattattttcagttttccaaaattctatcatctttaaacctaaataattcaatttcatggatgcacaaatgtttattgagagtctcatattcatgcttttcttcacagcactataaagttggacttggaaaatttggacagccatttgccattgtaatttttattcttttttctcctgattatttgacaaaacttgtatccacattgtagctgttcatgtgtctgcttctattgcatattgtaaaattattaactacttcccaaaatagtatttctctcagcagatatttctttggtactaccatgtattgtgtaacttttgggaaagtaaggtggcttccctgctctcagtgaagcattttattaaaagaataattataattaaaaaaacacgatacagatcagtgcatatagtatattactaatagtatgctgttaattgtgtaagaaagaaaggaaattagaaaacatatttgcataaataaaagctagacaaaggctaagaaactaatcaggtggtttccctggggtagtaggataatggggaacagtggggctgggaccgggtgggagaaagagttctcagtggttcctttctatacagttttaacttttgaaatgtgtgagagtgttacttactgaaaactgaaaggatatgacatgctggaacaggcaaaactacaaagacagtaaaaagatcagtgatttccaggagctgcaagggcagtgagaggaagggagggatgaggaggtggagtgcaggggatgttagggcagtgaaaggttctgtatgacactgtgatggtgggtacatgacattgggcattggtcaaaacccatagcatgtacagcacaaagcgtttgctctaatgtgagctatggactttagttaatagtaacgtgtcaatattggttcatcagttgtatcaaatgtaccacactgatgccagatgttaataatcggggaaactgtgtgtgctgaagagtacgtgggagctctctgtgctatctgctcaatttttctctaaacctaaaactgttctaaaatagaaagtctgtgaaaaaaaacaaaagtaaagttataaaaggaaaagaaaacagaggctttaaattaaatcatctattccttgggaaaggtattttgtaccatatgggactgaaatcatttctctggatgaattttataaaatgaattttgtaatttttttctgagaaaaaaaagttcttaaatacaataaaattgaaatgttgaaatatatctctcaaa

SEQ ID NO: 7739 - protein, 423 aa, Homo sapiens
MNALLLSAWFGHLRILQILVNSGAKIHCESKDGLTLLHCAAQKGHVPVLAFIMEDLEDVALDHVDKLGRTAFHRAAEHGQLDALDFLVGSGCDHNVKDKEGNTALHLAAGRGHMAVLQRLVDIGLDLEEQNAEGLTALHSAAGGSHPDCVQLLLRAGSTVNALTQKNLSCLHYAALSGSEDVSRVLIHAGGCANVVDHQGASPLHLAVRHNFPALVRLLINSDSDVNAVDNRQQTPLHLAAEHAWQDIADMLLIAGVDLNLRDKQGKTALAVAVRSNHVSLVDMIIKADRFYRWEKDHPSDPSGKSLSFKQDHRQETQQLRSVLWRLASRYLQPREWKKLAYSWEFTEAHVDAIEQQWTGTRSYQEHGHRMLLIWLHGVATAGENPSKALFEGLVAIGRRDLAENIRKKANAAPSAPRRCTAM

SEQ ID NO: 7740 - DNA, 8192 bp, Homo sapiens
agattccgagtcaaccaccgttcactgggcgccccttgagctctgggcgctggcctcctggcttccacgtccgttatcttaattgagtctcgctggggttgggaggccgggtattgtcagcgcttacagatgaggaaacggaagcccacagaggcgaagggattttccttaagtccgacttggcagatgggcttcggcctcagattttctggtttttcagctggtggtcttttttctctcctgcctcatgctaggtcgattccctccctgctcactgccctctcccattctgttccacccactcgcagcaggacactttcctttcctgccacacctgtcttctcacacacttttcttctaagacttggcattcctcccatctctcttctcaatattctctgctatgcctctcctcttgttcctcattcatagtttttcaaggtctttgccccctctgtgctattgaatctctcaactaggtgtggaccctaaagaatgagatagctaggcttcagtgaggctttaggtgtttaagtggacggctgtttggcccttgagttaaaaattaaggaatttcacttgagtggatccaaactcaagagtcctaaagctattttctgagtcaacatgctctatttctgagtgaggggcttagtgctatgaggtgtcttgacatcttagtccattgttgctgtgctggcataacctcgctgtttttcctgcacttgccacttagcttttcccaccccatcccttcatcacctacttgggctatgggagcccaaaattaaaacttatagagtaacagatgtaatagcagaccttcctttttttttttttcctaagccagaatttcaacaagtttaatgcttctttttccagaaaagttacctatttaaattattctcagagtaatgcagcaagaaaatggaatgcacttaagatgaatagaaaattgtttatctcgtgaaaagtcttaagttattaaattcaagttaattccctttctgcaaaaatggcctgtaactcttactggctatcctcctgagttaattctatctccatccagcttgatatgacattattatgtaaaagaggaacaggaataggcacataaaaataaattttattaatcatatgccgtttttgatgatttgcaatagtcactgagtaacttcacatctgtatgccttttgtaactttttaaagcctttccatggttttcctttgtctggacaccaaagtttgctatgttaggatattcttttgactatattgggctacacatctctgaaataaaataattcttgaattctgataacataaaacgcagatacaaaataatgtaggcattatatattgccccaaaaagtgatattttggtatcagttttaactactattttggggcttctctttttggccacatatggtccatcttaatgatcaaagtcttatcttatttcattatcctggtgagcaggctttgatggtgaggaaaggaaagattcctgtgagaagagcaggatgagcagagggattctatgcttgaagtcgagtcacttgaaaaagatctctttgaatgtggaagagatctgagcagatgaaaataaaatcaggaaaatgcaacatggcagcagcaatggaaacagaacagctgggtgttgagatatttgaaactgcggactgtgaggagaatattgaatcacaggatcggcctaaattggagcctttttatgttgagcggtattcctggagtcagcttaaaaagctgcttgccgataccagaaaatatcatggctacatgatggctaaggcaccacatgatttcatgtttgtgaagaggaatgatccagatggacctcattcagacagaatctattaccttgccatgtctggtgagaacagagaaaatacactgttttattctgaaattcccaaaactatcaatagagcagcagtcttaatgctctcttggaagcctcttttggatctttttcaggcaacactggactatggaatgtattctcgagaagaagaactattaagagaaagaaaacgcattggaacagtcggaattgcttcttacgattatcaccaaggaagtggaacatttctgtttcaagccggtagtggaatttatcacgtaaaagatggagggccacaaggatttacgcaacaacctttaaggcccaatctagtggaaactagttgtcccaacatacggatggatccaaaattatgccctgctgatccagactggattgcttttatacatagcaacgatatttggatatctaacatcgtaaccagagaagaaaggagactcacttatgtgcacaatgagctagccaacatggaagaagatgccagatcagctggagtcgctacctttgttctccaagaagaatttgatagatattctggctattggtggtgtccaaaagctgaaacaactcccagtggtggtaaaattcttagaattctatatgaagaaaatgatgaatctgaggtggaaattattcatgttacatcccctatgttggaaacaaggagggcagattcattccgttatcctaaaacaggtacagcaaatcctaaagtcacttttaagatgtcagaaataatgattgatgctgaaggaaggatcatagatgtcatagataaggaactaattcaaccttttgagattctatttgaaggagttgaatatattgccagagctggatggactcctgagggaaaatatgcttggtccatcctactagatcgctcccagactcgcctacagatagtgttgatctcacctgaattatttatcccagtagaagatgatgttatggaaaggcagagactcattgagtcagtgcctgattctgtgacgccactaattatctatgaagaaacaacagacatctggataaatatccatgacatctttcatgtttttccccaaagtcacgaagaggaaattgagtttatttttgcctctgaatgcaaaacaggtttccgtcatttatacaaaattacatctattttaaaggaaagcaaatataaacgatccagtggtgggctgcctgctccaagtgatttcaagtgtcctatcaaagaggagatagcaattaccagtggtgaatgggaagttcttggccggcatggatctaatatccaagttgatgaagtcagaaggctggtatattttgaaggcaccaaagactcccctttagagcatcacctgtacgtagtcagttacgtaaatcctggagaggtgacaaggctgactgaccgtggctactcacattcttgctgcatcagtcagcactgtgacttctttataagtaagtatagtaaccagaagaatccacactgtgtgtccctttacaagctatcaagtcctgaagatgacccaacttgcaaaacaaaggaattttgggccaccattttggattcagcaggtcctcttcctgactatactcctccagaaattttctcttttgaaagtactactggatttacattgtatgggatgctctacaagcctcatgatctacagcctggaaagaaatatcctactgtgctgttcatatatggtggtcctcaggtgcagttggtgaataatcggtttaaaggagtcaagtatttccgcttgaataccctagcctctctaggttatgtggttgtagtgatagacaacaggggatcctgtcaccgagggcttaaatttgaaggcgcctttaaatataaaatgggtcaaatagaaattgacgatcaggtggaaggactccaatatctagcttctcgatatgatttcattgacttagatcgtgtgggcatccacggctggtcctatggaggatacctctccctgatggcattaatgcagaggtcagatatcttcagggttgctattgctggggccccagtcactctgtggatcttctatgatacaggatacacggaacgttatatgggtcaccctgaccagaatgaacagggctattacttaggatctgtggccatgcaagcagaaaagttcccctctgaaccaaatcgtttactgctcttacatggtttcctggatgagaatgtccattttgcacataccagtatattactgagttttttagtgagggctggaaagccatatgatttacagatctatcctcaggagagacacagcataagagttcctgaatcgggagaacattatgaactgcatcttttgcactaccttcaagaaaaccttggatcacgtattgctgctctaaaagtgatataattttgacctgtgtagaactctctggtatacactggctatttaaccaaatgaggaggtttaatcaacagaaaacacagaattgatcatcacattttgatacctgccatgtaacatctactcctgaaaataaatgtggtgccatgcaggggtctacggtttgtggtagtaatctaataccttaaccccacatgctcaaaatcaaatgatacatattcctgagagacccagcaataccataagaattactaaaaaaaaaaaaaaaaaaaagacattagcaccatgtattcatactaccctattttcacttttaatagtattataaacttcatgaacttaattagtgtatttttacagtatacttttgagtttgttaaaatatgatgatattagtgattggtttggttcagttccagaatctttgactagttacagatttgatagcacttaaatgtaattgaatagcttatgcttcattgcttgggcatatccagcatgttatgaactaataactattaaacttgacttaaccagtcattcattaataatttttcaaggataacttagtggcctcctaaagacacttgttttggcactgaccagtttttagccaatttaatctgtatctagtataaataattctcatttttctttgatgatattaacagagtgggcttttccttttgcataaaggctagtaactgtatatgtagcatggatttaattagtcatgatattgataattacaggcagaaaatttttaatcaaatgattagagcttaaatatttgcaggcaagtttttttttttcctttaagaaaaggaaaaagtacacattcactagaattcttcagaaaatttagtggtgccagtttccatttggtatttccttattaaaatattctagaattttaaggagattgaagggaatcacagtggggtggggagacctgggtttggggaatgacagagagaagaggtggtgagggcctgattaaaaactaagcagaagtagttttaacaaaaatactcatgaaaatgtttggaaactgaaatttaaacaactgtaatattaaggaaaccagaatcaataaatcactgtcttgccagcacagctacagagtaacatgattcaggggaggaaaagttccttagagttacttttataattctttttttttttcctcttaggtttagaaatcttacaaatttaaactttatccttttaaaattatttgaacataatttagatattgtaagcttaaaatacaaatgtttatagataacctctttaccataaactaatccctggcaagccatggctctctttttttttttggtgtttaaagcctgtaaacagtttttctgaatgatcatgaacttttcttggtttagcactaggatttagctatgaagagagctcataggctttcaggtgctaattgagatctgccctgttagagtcttggggtgctagattggtcacattgacaccagtggcagggaaggcatctatgagtttgatgctttttatcacacacttcagtgtttagaaagttattaccaatacttttaaacaacactccaagaaaatttgctatatttctttctcatcactacagagagagtagatttccccatagagagcacagcctccattagtaaggttggtgactattggtaagaggtggacttcattgacaccaagtgggaggtagggaaagcccagaaatggcaggatgatatggtggttctgtcgttgggaaaggtattgggttttgctgtttgtatttatactgtataatagataccacgctttttcttattatctgtatatgtattgcttttcatgtttgatattttcccatgccaagatttgtttatatatattttcaatgttaaattaaattgatttgggtaactttcttccccaagaaagtattttcccccttaagtatatatctgactgtggagggtgttttgttttgttttgttttgttttgtttggactaactggcctcgaaggatctatccttataatatatgcaaagtagaaatggtatacagtagcttttaagcagctactccattgaaacctctcacccattaaggctgtttcttcaaagtggcatctcttattttaccgaaacaaacttagaaaacttcatgtactctggagttcacaggtgttttccttttgcatgttgccttctcctttcctcctatcacaaagaatgcttctattatcactcccagtcacttaaatgccattctgcttctttagcaggaaaaaatacctgaatgaattctcttacagaaagacagtttgactgaatttgctttttacaatcagtgtggaaaatatcatagtcaattgaggcaatcagtagaaatctcactaaaagtttgtaccccctgagtatgggtaacagcttaaacggcaagaatatataaaagtagcaacagtttagtgggagccaaaaagcactaggttaaatatcatactacgtttttaaagacttgataaatgtgtacacttgaacaaccatccagagggatagttacttgagcattacagagtagtggaactcaaaatctaagattcatctgggatacttctaaaagaaatgtagagttttgaatctcactcttaaaaatgtgtattcccaggctaggcatggtggctcacgcctgtaatcctagcactttgggaggccaaggcgggtgaatcacttgaagtcaggagatcaagaccagcttggtcgacatggtgaaaccccgtctctactaaaagtacaaaaaaattagctgggcatgatggcgtgtgcctataatcccacctactcgggaggctgaggcaggagaatcgcttgaacctgggaggcggaagttgcagtgagccgagatggcgccactgtagtccagtctgggcgacagagtgagattctgcctcaaaataaataaataaataaaaatttgtattccattgatttgggtagacaccaggaatgtgcatttctaacaagctttccaggcgatcctatagtaagtcatctgtggactactttaagaaactcttctatagagaatggagttggattaataataggtgattttttacactggactgattcacaagaacctaaacagtagtccatgaagctgctcatctgtggtaactatttggccccgtctcactctgaaagcagcaggagatgttgtttactttgtttctatcccctttgtctggagattaattttggaatgaaagtttttctctctatgccattcctggttcttttccaaagcctcatacaagaggattaggtcacaatgcatgcattaccttttaaaagaatgcgatattgataccgatgcttacttttttttttttactacttgttttattcctt[450 bp omitted]cttccttggtatagtggaggatttgaggattggaatatagagtagagtgcttgct

SEQ ID NO: 7741 - protein, 898 aa, Homo sapiens; identical to SEQ ID NO: 1072

SEQ ID NO: 7742 - DNA, 7282 bp, Homo sapiens
ggatcgcaacgaaccggaagtgctaaagcctccgaggccaaggccgctgctactgccgccgctgcttcttagtgccgcgttcgccgcctgggttgtcaccggcgccgccgccgaggaagccactgcaaccaggaccggagtggaggcggcgcagcatgaagcggcgcaggcccgctccatagcgcacgtcgggacggtccgggcggggccggggggaaggctttgatggtgaggaaaggaaagattcctgtgagaagagcaggatgagcagagggattctatgcttgaagtcgagtcacttgaaaaagatctctttgaatgtggaagagatctgagcagatgaaaataaaatcaggaaaatgcaacatggcagcagcaatggaaacagaacagctgggtgttgagatatttgaaactgcggactgtgaggagaatattgaatcacaggatcggcctaaattggagcctttttatgttgagcggtattcctggagtcagcttaaaaagctgcttgccgataccagaaaatatcatggctacatgatggctaaggcaccacatgatttcatgtttgtgaagaggaatgatccagatggacctcattcagacagaatctattaccttgccatgtctggtgagaacagagaaaatacactgttttattctgaaattcccaaaactatcaatagagcagcagtcttaatgctctcttggaagcctcttttggatctttttcaggcaacactggactatggaatgtattctcgagaagaagaactattaagagaaagaaaacgcattggaacagtcggaattgcttcttacgattatcaccaaggaagtggaacatttctgtttcaagccggtagtggaatttatcacgtaaaagatggagggccacaaggatttacgcaacaacctttaaggcccaatctagtggaaactagttgtcccaacatacggatggatccaaaattatgccctgctgatccagactggattgcttttatacatagcaacgatatttggatatctaacatcgtaaccagagaagaaaggagactcacttatgtgcacaatgagctagccaacatggaagaagatgccagatcagctggagtcgctacctttgttctccaagaagaatttgatagatattctggctattggtggtgtccaaaagctgaaacaactcccagtggtggtaaaattcttagaattctatatgaagaaaatgatgaatctgaggtggaaattattcatgttacatcccctatgttggaaacaaggagggcagattcattccgttatcctaaaacaggtacagcaaatcctaaagtcacttttaagatgtcagaaataatgattgatgctgaaggaaggatcatagatgtcatagataaggaactaattcaaccttttgagattctatttgaaggagttgaatatattgccagagctggatggactcctgagggaaaatatgcttggtccatcctactagatcgctcccagactcgcctacagatagtgttgatctcacctgaattatttatcccagtagaagatgatgttatggaaaggcagagactcattgagtcagtgcctgattctgtgacgccactaattatctatgaagaaacaacagacatctggataaatatccatgacatctttcatgtttttccccaaagtcacgaagaggaaattgagtttatttttgcctctgaatgcaaaacaggtttccgtcatttatacaaaattacatctattttaaaggaaagcaaatataaacgatccagtggtgggctgcctgctccaagtgatttcaagtgtcctatcaaagaggagatagcaattaccagtggtgaatgggaagttcttggccggcatggatctaatatccaagttgatgaagtcagaaggctggtatattttgaaggcaccaaagactcccctttagagcatcacctgtacgtagtcagttacgtaaatcctggagaggtgacaaggctgactgaccgtggctactcacattcttgctgcatcagtcagcactgtgacttctttataagtaagtatagtaaccagaagaatccacactgtgtgtccctttacaagctatcaagtcctgaagatgacccaacttgcaaaacaaaggaattttgggccaccattttggattcagcaggtcctcttcctgactatactcctccagaaattttctcttttgaaagtactactggatttacattgtatgggatgctctacaagcctcatgatctacagcctggaaagaaatatcctactgtgctgttcatatatggtggtcctcaggtgcagttggtgaataatcggtttaaaggagtcaagtatttccgcttgaataccctagcctctctaggttatgtggttgtagtgatagacaacaggggatcctgtcaccgagggcttaaatttgaaggcgcctttaaatataaaatggttgctattgctggggccccagtcactctgtggatcttctatgatacaggatacacggaacgttatatgggtcaccctgaccagaatgaacagggctattacttaggatctgtggccatgcaagcagaaaagttcccctctgaaccaaatcgtttactgctcttacatggtttcctggatgagaatgtccattttgcacataccagtatattactgagttttttagtgagggctggaaagccatatgatttacagatctatcctcaggagagacacagcataagagttcctgaatcgggagaacattatgaactgcatcttttgcactaccttcaagaaaaccttggatcacgtattgctgctctaaaagtgatataattttgacctgtgtagaactctctggtatacactggctatttaaccaaatgaggaggtttaatcaacagaaaacacagaattgatcatcacattttgatacctgccatgtaacatctactcctgaaaataaatgtggtgccatgcaggggtctacggtttgtggtagtaatctaataccttaaccccacatgctcaaaatcaaatgatacatattcctgagagacccagcaataccataagaattactaaaaaaaaaaaaaaaaaaaagacattagcaccatgtattcatactaccctattttcacttttaatagtattataaacttcatgaacttaattagtgtatttttacagtatacttttgagtttgttaaaatatgatgatattagtgattggtttggttcagttccagaatctttgactagttacagatttgatagcacttaaatgtaattgaatagcttatgcttcattgcttgggcatatccagcatgttatgaactaataactattaaacttgacttaaccagtcattcattaataatttttcaaggataacttagtggcctcctaaagacacttgttttggcactgaccagtttttagccaatttaatctgtatctagtataaataattctcatttttctttgatgatattaacagagtgggcttttccttttgcataaaggctagtaactgtatatgtagcatggatttaattagtcatgatattgataattacaggcagaaaatttttaatcaaatgattagagcttaaatatttgcaggcaagtttttttttttcctttaagaaaaggaaaaagtacacattcactagaattcttcagaaaatttagtggtgccagtttccatttggtatttccttattaaaatattctagaattttaaggagattgaagggaatcacagtggggtggggagacctgggtttggggaatgacagagagaagaggtggtgagggcctgattaaaaactaagcagaagtagttttaacaaaaatactcatgaaaatgtttggaaactgaaatttaaacaactgtaatattaaggaaaccagaatcaataaatcactgtcttgccagcacagctacagagtaacatgattcaggggaggaaaagttccttagagttacttttataattctttttttttttcctcttaggtttagaaatcttacaaatttaaactttatccttttaaaattatttgaacataatttagatattgtaagcttaaaatacaaatgtttatagataacctctttaccataaactaatccctggcaagccatggctctctttttttttttggtgtttaaagcctgtaaacagtttttctgaatgatcatgaacttttcttggtttagcactaggatttagctatgaagagagctcataggctttcaggtgctaattgagatctgccctgttagagtcttggggtgctagattggtcacattgacaccagtggcagggaaggcatctatgagtttgatgctttttatcacacacttcagtgtttagaaagttattaccaatacttttaaacaacactccaagaaaatttgctatatttctttctcatcactacagagagagtagatttccccatagagagcacagcctccattagtaaggttggtgactattggtaagaggtggacttcattgacaccaagtgggaggtagggaaagcccagaaatggcaggatgatatggtggttctgtcgttgggaaaggtattgggttttgctgtttgtatttatactgtataatagataccacgctttttcttattatctgtatatgtattgcttttcatgtttgatattttcccatgccaagatttgtttatatatattttcaatgttaaattaaattgatttgggtaactttcttccccaagaaagtattttcccccttaagtatatatctgactgtggagggtgttttgttttgttttgttttgttttgtttggactaactggcctcgaaggatctatccttataatatatgcaaagtagaaatggtatacagtagcttttaagcagctactccattgaaacctctcacccattaaggctgtttcttcaaagtggcatctcttattttaccgaaacaaacttagaaaacttcatgtactctggagttcacaggtgttttccttttgcatgttgccttctcctttcctcctatcacaaagaatgcttctattatcactcccagtcacttaaatgccattctgcttctttagcaggaaaaaatacctgaatgaattctcttacagaaagacagtttgactgaatttgctttttacaatcagtgtggaaaatatcatagtcaattgaggcaatcagtagaaatctcactaaaagtttgtaccccctgagtatgggtaacagcttaaacggcaagaatatataaaagtagcaacagtttagtgggagccaaaaagcactaggttaaatatcatactacgtttttaaagacttgataaatgtgtacacttgaacaaccatccagagggatagttacttgagcattacagagtagtggaactcaaaatctaagattcatctgggatacttctaaaagaaatgtagagttttgaatctcactcttaaaaatgtgtattcccaggctaggcatggtggctcacgcctgtaatcctagcactttgggaggccaaggcgggtgaatcacttgaagtcaggagatcaagaccagcttggtcgacatggtgaaaccccgtctctactaaaagtacaaaaaaattagctgggcatgatggcgtgtgcctataatcccacctactcgggaggctgaggcaggagaatcgcttgaacctgggaggcggaagttgcagtgagccgagatggcgccactgtagtccagtctgggcgacagagtgagattctgcctcaaaataaataaataaataaaaatttgtattccattgatttgggtagacaccaggaatgtgcatttctaacaagctttccaggcgatcctatagtaagtcatctgtggactactttaagaaactcttctatagagaatggagttggattaataataggtgattttttacactggactgattcacaagaacctaaacagtagtccatgaagctgctcatctgtggtaactatttggccccgtctcactctgaaagcagcaggagatgttgtttactttgtttctatcccctttgtctggagattaattttggaatgaaagtttttctctctatgccattcctggttcttttccaaagcctcatacaagaggattaggtcacaatgcatgcattaccttttaaaagaatgcgatattgataccgatgcttacttttttttttttactacttgttttattcctt[450 bp omitted]cttccttggtatagtggaggatttgaggattggaatatagagtagagtgcttgcttaagcctgggagcccatctttatagctatttgatgtaagaaaagagacatggccatttctaaactatataaggtgagtgtgtctattcccagcagatataaaggaaaaaggaaacttttttgattcccaccttcccagcctcacctagccatcttccagcctcaaatatagagatgttagtgcaaggtcctgggctctaggtgatcatttcataagtcctttacagataaagaaaaagtagtgtttgtatgtttgtttttaagtaaccccaaaacaaatttatattgtattcagcaaaattggaattcaggtgtttaattttagaacatgaagtgcctgctgttttaagcattgacttgtataaaaagaattgcatgtctccagtaagcttatgggttttctcatttttaggtatatggcttttaatcatgtaaagtgaaacattagttttcttgcattttattacaggttctttgttgcaataaagatgctgctgaaattaattg

SEQ ID NO: 7743 - protein, 847 aa, Homo sapiens; identical to SEQ ID NO: 1074

SEQ ID NO: 7744 - DNA, 7302 bp, Homo sapiens
agcggatcgcaacgaaccggaagtgctaaagcctccgaggccaaggccgctgctactgccgccgctgcttcttagtgccgcgttcgccgcctgggttgtcaccggcgccgccgccgaggaagccactgcaaccaggaccggagtggaggcggcgcagcatgaagcggcgcaggcccgctccatagcgcacgtcgggacggtccgggcggggccggggggaaggaaaatgcaacatggcagcagcaatggaaacagaacagctgggtgttgagatatttgaaactgcggactgtgaggagaatattgaatcacaggatcggcctaaattggagcctttttatgttgagcggtattcctggagtcagcttaaaaagctgcttgccgataccagaaaatatcatggctacatgatggctaaggcaccacatgatttcatgtttgtgaagaggaatgatccagatggacctcattcagacagaatctattaccttgccatgtctggtgagaacagagaaaatacactgttttattctgaaattcccaaaactatcaatagagcagcagtcttaatgctctcttggaagcctcttttggatctttttcaggcaacactggactatggaatgtattctcgagaagaagaactattaagagaaagaaaacgcattggaacagtcggaattgcttcttacgattatcaccaaggaagtggaacatttctgtttcaagccggtagtggaatttatcacgtaaaagatggagggccacaaggatttacgcaacaacctttaaggcccaatctagtggaaactagttgtcccaacatacggatggatccaaaattatgccctgctgatccagactggattgcttttatacatagcaacgatatttggatatctaacatcgtaaccagagaagaaaggagactcacttatgtgcacaatgagctagccaacatggaagaagatgccagatcagctggagtcgctacctttgttctccaagaagaatttgatagatattctggctattggtggtgtccaaaagctgaaacaactcccagtggtggtaaaattcttagaattctatatgaagaaaatgatgaatctgaggtggaaattattcatgttacatcccctatgttggaaacaaggagggcagattcattccgttatcctaaaacaggtacagcaaatcctaaagtcacttttaagatgtcagaaataatgattgatgctgaaggaaggatcatagatgtcatagataaggaactaattcaaccttttgagattctatttgaaggagttgaatatattgccagagctggatggactcctgagggaaaatatgcttggtccatcctactagatcgctcccagactcgcctacagatagtgttgatctcacctgaattatttatcccagtagaagatgatgttatggaaaggcagagactcattgagtcagtgcctgattctgtgacgccactaattatctatgaagaaacaacagacatctggataaatatccatgacatctttcatgtttttccccaaagtcacgaagaggaaattgagtttatttttgcctctgaatgcaaaacaggtttccgtcatttatacaaaattacatctattttaaaggaaagcaaatataaacgatccagtggtgggctgcctgctccaagtgatttcaagtgtcctatcaaagaggagatagcaattaccagtggtgaatgggaagttcttggccggcatggatctaatatccaagttgatgaagtcagaaggctggtatattttgaaggcaccaaagactcccctttagagcatcacctgtacgtagtcagttacgtaaatcctggagaggtgacaaggctgactgaccgtggctactcacattcttgctgcatcagtcagcactgtgacttctttataagtaagtatagtaaccagaagaatccacactgtgtgtccctttacaagctatcaagtcctgaagatgacccaacttgcaaaacaaaggaattttgggccaccattttggattcagcaggtcctcttcctgactatactcctccagaaattttctcttttgaaagtactactggatttacattgtatgggatgctctacaagcctcatgatctacagcctggaaagaaatatcctactgtgctgttcatatatggtggtcctcaggtgcagttggtgaataatcggtttaaaggagtcaagtatttccgcttgaataccctagcctctctaggttatgtggttgtagtgatagacaacaggggatcctgtcaccgagggcttaaatttgaaggcgcctttaaatataaaatgggtcaaatagaaattgacgatcaggtggaaggactccaatatctagcttctcgatatgatttcattgacttagatcgtgtgggcatccacggctggtcctatggaggatacctctccctgatggcattaatgcagaggtcagatatcttcagggttgctattgctggggccccagtcactctgtggatcttctatgatacaggatacacggaacgttatatgggtcaccctgaccagaatgaacagggctattacttaggatctgtggccatgcaagcagaaaagttcccctctgaaccaaatcgtttactgctcttacatggtttcctggatgagaatgtccattttgcacataccagtatattactgagttttttagtgagggctggaaagccatatgatttacagatctatcctcaggagagacacagcataagagttcctgaatcgggagaacattatgaactgcatcttttgcactaccttcaagaaaaccttggatcacgtattgctgctctaaaagtgatataattttgacctgtgtagaactctctggtatacactggctatttaaccaaatgaggaggtttaatcaacagaaaacacagaattgatcatcacattttgatacctgccatgtaacatctactcctgaaaataaatgtggtgccatgcaggggtctacggtttgtggtagtaatctaataccttaaccccacatgctcaaaatcaaatgatacatattcctgagagacccagcaataccataagaattactaaaaaaaaaaaaaaaaaaaagacattagcaccatgtattcatactaccctattttcacttttaatagtattataaacttcatgaacttaattagtgtatttttacagtatacttttgagtttgttaaaatatgatgatattagtgattggtttggttcagttccagaatctttgactagttacagatttgatagcacttaaatgtaattgaatagcttatgcttcattgcttgggcatatccagcatgttatgaactaataactattaaacttgacttaaccagtcattcattaataatttttcaaggataacttagtggcctcctaaagacacttgttttggcactgaccagtttttagccaatttaatctgtatctagtataaataattctcatttttctttgatgatattaacagagtgggcttttccttttgcataaaggctagtaactgtatatgtagcatggatttaattagtcatgatattgataattacaggcagaaaatttttaatcaaatgattagagcttaaatatttgcaggcaagtttttttttttcctttaagaaaaggaaaaagtacacattcactagaattcttcagaaaatttagtggtgccagtttccatttggtatttccttattaaaatattctagaattttaaggagattgaagggaatcacagtggggtggggagacctgggtttggggaatgacagagagaagaggtggtgagggcctgattaaaaactaagcagaagtagttttaacaaaaatactcatgaaaatgtttggaaactgaaatttaaacaactgtaatattaaggaaaccagaatcaataaatcactgtcttgccagcacagctacagagtaacatgattcaggggaggaaaagttccttagagttacttttataattctttttttttttcctcttaggtttagaaatcttacaaatttaaactttatccttttaaaattatttgaacataatttagatattgtaagcttaaaatacaaatgtttatagataacctctttaccataaactaatccctggcaagccatggctctctttttttttttggtgtttaaagcctgtaaacagtttttctgaatgatcatgaacttttcttggtttagcactaggatttagctatgaagagagctcataggctttcaggtgctaattgagatctgccctgttagagtcttggggtgctagattggtcacattgacaccagtggcagggaaggcatctatgagtttgatgctttttatcacacacttcagtgtttagaaagttattaccaatacttttaaacaacactccaagaaaatttgctatatttctttctcatcactacagagagagtagatttccccatagagagcacagcctccattagtaaggttggtgactattggtaagaggtggacttcattgacaccaagtgggaggtagggaaagcccagaaatggcaggatgatatggtggttctgtcgttgggaaaggtattgggttttgctgtttgtatttatactgtataatagataccacgctttttcttattatctgtatatgtattgcttttcatgtttgatattttcccatgccaagatttgtttatatatattttcaatgttaaattaaattgatttgggtaactttcttccccaagaaagtattttcccccttaagtatatatctgactgtggagggtgttttgttttgttttgttttgttttgtttggactaactggcctcgaaggatctatccttataatatatgcaaagtagaaatggtatacagtagcttttaagcagctactccattgaaacctctcacccattaaggctgtttcttcaaagtggcatctcttattttaccgaaacaaacttagaaaacttcatgtactctggagttcacaggtgttttccttttgcatgttgccttctcctttcctcctatcacaaagaatgcttctattatcactcccagtcacttaaatgccattctgcttctttagcaggaaaaaatacctgaatgaattctcttacagaaagacagtttgactgaatttgctttttacaatcagtgtggaaaatatcatagtcaattgaggcaatcagtagaaatctcactaaaagtttgtaccccctgagtatgggtaacagcttaaacggcaagaatatataaaagtagcaacagtttagtgggagccaaaaagcactaggttaaatatcatactacgtttttaaagacttgataaatgtgtacacttgaacaaccatccagagggatagttacttgagcattacagagtagtggaactcaaaatctaagattcatctgggatacttctaaaagaaatgtagagttttgaatctcactcttaaaaatgtgtattcccaggctaggcatggtggctcacgcctgtaatcctagcactttgggaggccaaggcgggtgaatcacttgaagtcaggagatcaagaccagcttggtcgacatggtgaaaccccgtctctactaaaagtacaaaaaaattagctgggcatgatggcgtgtgcctataatcccacctactcgggaggctgaggcaggagaatcgcttgaacctgggaggcggaagttgcagtgagccgagatggcgccactgtagtccagtctgggcgacagagtgagattctgcctcaaaataaataaataaataaaaatttgtattccattgatttgggtagacaccaggaatgtgcatttctaacaagctttccaggcgatcctatagtaagtcatctgtggactactttaagaaactcttctatagagaatggagttggattaataataggtgattttttacactggactgattcacaagaacctaaacagtagtccatgaagctgctcatctgtggtaactatttggccccgtctcactctgaaagcagcaggagatgttgtttactttgtttctatcccctttgtctggagattaattttggaatgaaagtttttctctctatgccattcctggttcttttccaaagcctcatacaagaggattaggtcacaatgcatgcattaccttttaaaagaatgcgatattgataccgatgcttacttttttttttttactacttgttttattcctt[450 bp omitted]cttccttggtatagtggaggatttgaggattggaatatagagtagagtgcttgcttaagcctgggagcccatctttatagctatttgatgtaagaaaagagacatggccatttctaaactatataaggtgagtgtgtctattcccagcagatataaaggaaaaaggaaacttttttgattcccaccttcccagcctcacctagccatcttccagcctcaaatatagagatgttagtgcaaggtcctgggctctaggtgatcatttcataagtcctttacagataaagaaaaagtagtgtttgtatgtttgtttttaagtaaccccaaaacaaatttatattgtattcagcaaaattggaattcaggtgtttaattttagaacatgaagtgcctgctgttttaagcattgacttgtataaaaagaattgcatgtctccagtaagcttatgggttttctcatttttaggtatatggcttttaatcatgtaaagtgaaacattagttttcttgcattttattacaggttctttgttgcaataaagatgctgctgaaattaattg

SEQ ID NO: 7745 - protein, 882 aa, Homo sapiens; identical to SEQ ID NO: 1070

SEQ ID NO: 7746 - DNA, 7002 bp, Homo sapiens
agcggatcgcaacgaaccggaagtgctaaagcctccgaggccaaggccgctgctactgccgccgctgcttcttagtgccgcgttcgccgcctgggttgtcaccggcgccgccgccgaggaagccactgcaaccaggaccggagtggaggcggcgcagcatgaagcggcgcaggcccgctccatagcgcacgtcgggacggtccgggcggggccggggggaaggaaaatgcaacatggcagcagcaatggaaacagaacagctgggtgttgagatatttgaaactgcggactgtgaggagaatattgaatcacaggatcggcctaaattggagcctttttatgttgagcggtattcctggagtcagcttaaaaagctgcttgccgataccagaaaatatcatggctacatgatggctaaggcaccacatgatttcatgtttgtgaagaggaatgatccagatggacctcattcagacagaatctattaccttgccatgtctggtgagaacagagaaaatacactgttttattctgaaattcccaaaactatcaatagagcagcagtcttaatgctctcttggaagcctcttttggatctttttcaggcaacactggactatggaatgtattctcgagaagaagaactattaagagaaagaaaacgcattggaacagtcggaattgcttcttacgattatcaccaaggaagtggaacatttctgtttcaagccggtagtggaatttatcacgtaaaagatggagggccacaaggatttacgcaacaacctttaaggcccaatctagtggaaactagttgtcccaacatacggatggatccaaaattatgccctgctgatccagactggattgcttttatacatagcaacgatatttggatatctaacatcgtaaccagagaagaaaggagactcacttatgtgcacaatgagctagccaacatggaagaagatgccagatcagctggagtcgctacctttgttctccaagaagaatttgatagatattctggctattggtggtgtccaaaagctgaaacaactcccagtggtggtaaaattcttagaattctatatgaagaaaatgatgaatctgaggtggaaattattcatgttacatcccctatgttggaaacaaggagggcagattcattccgttatcctaaaacaggtacagcaaatcctaaagtcacttttaagatgtcagaaataatgattgatgctgaaggaaggatcatagatgtcatagataaggaactaattcaaccttttgagattctatttgaaggagttgaatatattgccagagctggatggactcctgagggaaaatatgcttggtccatcctactagatcgctcccagactcgcctacagatagtgttgatctcacctgaattatttatcccagtagaagatgatgttatggaaaggcagagactcattgagtcagtgcctgattctgtgacgccactaattatctatgaagaaacaacagacatctggataaatatccatgacatctttcatgtttttccccaaagtcacgaagaggaaattgagtttatttttgcctctgaatgcaaaacaggtttccgtcatttatacaaaattacatctattttaaaggaaagcaaatataaacgatccagtggtgggctgcctgctccaagtgatttcaagtgtcctatcaaagaggagatagcaattaccagtggtgaatgggaagttcttggccggcatggatctaatatccaagttgatgaagtcagaaggctggtatattttgaaggcaccaaagactcccctttagagcatcacctgtacgtagtcagttacgtaaatcctggagaggtgacaaggctgactgaccgtggctactcacattcttgctgcatcagtcagcactgtgacttctttataagtaagtatagtaaccagaagaatccacactgtgtgtccctttacaagctatcaagtcctgaagatgacccaacttgcaaaacaaaggaattttgggccaccattttggattcagcaggtcctcttcctgactatactcctccagaaattttctcttttgaaagtactactggatttacattgtatgggatgctctacaagcctcatgatctacagcctggaaagaaatatcctactgtgctgttcatatatggtggtcctcaggttgctattgctggggccccagtcactctgtggatcttctatgatacaggatacacggaacgttatatgggtcaccctgaccagaatgaacagggctattacttaggatctgtggccatgcaagcagaaaagttcccctctgaaccaaatcgtttactgctcttacatggtttcctggatgagaatgtccattttgcacataccagtatattactgagttttttagtgagggctggaaagccatatgatttacagatctatcctcaggagagacacagcataagagttcctgaatcgggagaacattatgaactgcatcttttgcactaccttcaagaaaaccttggatcacgtattgctgctctaaaagtgatataattttgacctgtgtagaactctctggtatacactggctatttaaccaaatgaggaggtttaatcaacagaaaacacagaattgatcatcacattttgatacctgccatgtaacatctactcctgaaaataaatgtggtgccatgcaggggtctacggtttgtggtagtaatctaataccttaaccccacatgctcaaaatcaaatgatacatattcctgagagacccagcaataccataagaattactaaaaaaaaaaaaaaaaaaaagacattagcaccatgtattcatactaccctattttcacttttaatagtattataaacttcatgaacttaattagtgtatttttacagtatacttttgagtttgttaaaatatgatgatattagtgattggtttggttcagttccagaatctttgactagttacagatttgatagcacttaaatgtaattgaatagcttatgcttcattgcttgggcatatccagcatgttatgaactaataactattaaacttgacttaaccagtcattcattaataatttttcaaggataacttagtggcctcctaaagacacttgttttggcactgaccagtttttagccaatttaatctgtatctagtataaataattctcatttttctttgatgatattaacagagtgggcttttccttttgcataaaggctagtaactgtatatgtagcatggatttaattagtcatgatattgataattacaggcagaaaatttttaatcaaatgattagagcttaaatatttgcaggcaagtttttttttttcctttaagaaaaggaaaaagtacacattcactagaattcttcagaaaatttagtggtgccagtttccatttggtatttccttattaaaatattctagaattttaaggagattgaagggaatcacagtggggtggggagacctgggtttggggaatgacagagagaagaggtggtgagggcctgattaaaaactaagcagaagtagttttaacaaaaatactcatgaaaatgtttggaaactgaaatttaaacaactgtaatattaaggaaaccagaatcaataaatcactgtcttgccagcacagctacagagtaacatgattcaggggaggaaaagttccttagagttacttttataattctttttttttttcctcttaggtttagaaatcttacaaatttaaactttatccttttaaaattatttgaacataatttagatattgtaagcttaaaatacaaatgtttatagataacctctttaccataaactaatccctggcaagccatggctctctttttttttttggtgtttaaagcctgtaaacagtttttctgaatgatcatgaacttttcttggtttagcactaggatttagctatgaagagagctcataggctttcaggtgctaattgagatctgccctgttagagtcttggggtgctagattggtcacattgacaccagtggcagggaaggcatctatgagtttgatgctttttatcacacacttcagtgtttagaaagttattaccaatacttttaaacaacactccaagaaaatttgctatatttctttctcatcactacagagagagtagatttccccatagagagcacagcctccattagtaaggttggtgactattggtaagaggtggacttcattgacaccaagtgggaggtagggaaagcccagaaatggcaggatgatatggtggttctgtcgttgggaaaggtattgggttttgctgtttgtatttatactgtataatagataccacgctttttcttattatctgtatatgtattgcttttcatgtttgatattttcccatgccaagatttgtttatatatattttcaatgttaaattaaattgatttgggtaactttcttccccaagaaagtattttcccccttaagtatatatctgactgtggagggtgttttgttttgttttgttttgttttgtttggactaactggcctcgaaggatctatccttataatatatgcaaagtagaaatggtatacagtagcttttaagcagctactccattgaaacctctcacccattaaggctgtttcttcaaagtggcatctcttattttaccgaaacaaacttagaaaacttcatgtactctggagttcacaggtgttttccttttgcatgttgccttctcctttcctcctatcacaaagaatgcttctattatcactcccagtcacttaaatgccattctgcttctttagcaggaaaaaatacctgaatgaattctcttacagaaagacagtttgactgaatttgctttttacaatcagtgtggaaaatatcatagtcaattgaggcaatcagtagaaatctcactaaaagtttgtaccccctgagtatgggtaacagcttaaacggcaagaatatataaaagtagcaacagtttagtgggagccaaaaagcactaggttaaatatcatactacgtttttaaagacttgataaatgtgtacacttgaacaaccatccagagggatagttacttgagcattacagagtagtggaactcaaaatctaagattcatctgggatacttctaaaagaaatgtagagttttgaatctcactcttaaaaatgtgtattcccaggctaggcatggtggctcacgcctgtaatcctagcactttgggaggccaaggcgggtgaatcacttgaagtcaggagatcaagaccagcttggtcgacatggtgaaaccccgtctctactaaaagtacaaaaaaattagctgggcatgatggcgtgtgcctataatcccacctactcgggaggctgaggcaggagaatcgcttgaacctgggaggcggaagttgcagtgagccgagatggcgccactgtagtccagtctgggcgacagagtgagattctgcctcaaaataaataaataaataaaaatttgtattccattgatttgggtagacaccaggaatgtgcatttctaacaagctttccaggcgatcctatagtaagtcatctgtggactactttaagaaactcttctatagagaatggagttggattaataataggtgattttttacactggactgattcacaagaacctaaacagtagtccatgaagctgctcatctgtggtaactatttggccccgtctcactctgaaagcagcaggagatgttgtttactttgtttctatcccctttgtctggagattaattttggaatgaaagtttttctctctatgccattcctggttcttttccaaagcctcatacaagaggattaggtcacaatgcatgcattaccttttaaaagaatgcgatattgataccgatgcttacttttttttttttactacttgttttattcctt[450 bp omitted]cttccttggtatagtggaggatttgaggattggaatatagagtagagtgcttgcttaagcctgggagcccatctttatagctatttgatgtaagaaaagagacatggccatttctaaactatataaggtgagtgtgtctattcccagcagatataaaggaaaaaggaaacttttttgattcccaccttcccagcctcacctagccatcttccagcctcaaatatagagatgttagtgcaaggtcctgggctctaggtgatcatttcataagtcctttacagataaagaaaaagtagtgtttgtatgtttgtttttaagtaaccccaaaacaaatttatattgtattcagcaaaattggaattcaggtgtttaattttagaacatgaagtgcctgctgttttaagcattgacttgtataaaaagaattgcatgtctccagtaagcttatgggttttctcatttttaggtatatggcttttaatcatgtaaagtgaaacattagttttcttgcattttattacaggttctttgttgcaataaagatgctgctgaaattaattg

SEQ ID NO: 7747 - protein, 782 aa, Homo sapiens; identical to SEQ ID NO: 1068

SEQ ID NO: 7748 - DNA, 6199 bp, Homo sapiens
agattccgagtcaaccaccgttcactgggcgccccttgagctctgggcgctggcctcctggcttccacgtccgttatcttaattgagtctcgctggggttgggaggccgggtattgtcagcgcttacagatgaggaaacggaagcccacagaggcgaagggattttccttaagtccgacttggcagatgggcttcggcctcagattttctggtttttcagctggtggtcttttttctctcctgcctcatgctaggtcgattccctccctgctcactgccctctcccattctgttccacccactcgcagcaggacactttcctttcctgccacacctgtcttctcacacacttttcttctaagacttggcattcctcccatctctcttctcaatattctctgctatgcctctcctcttgttcctcattcatagtttttcaaggtctttgccccctctgtgctattgaatctctcaactaggtgtggaccctaaagaatgagatagctaggcttcagtgaggctttaggtgtttaagtggacggctgtttggcccttgagttaaaaattaaggaatttcacttgagtggatccaaactcaagagtcctaaagctattttctgagtcaacatgctctatttctgagtgaggggcttagtgctatgaggtgtcttgacatcttagtccattgttgctgtgctggcataacctcgctgtttttcctgcacttgccacttagcttttcccaccccatcccttcatcacctacttgggctatgggagcccaaaattaaaacttatagagtaacagatgtaatagcagaccttcctttttttttttttcctaagccagaatttcaacaagtttaatgcttctttttccagaaaagttacctatttaaattattctcagagtaatgcagcaagaaaatggaatgcacttaagatgaatagaaaattgtttatctcgtgaaaagtcttaagttattaaattcaagttaattccctttctgcaaaaatggcctgtaactcttactggctatcctcctgagttaattctatctccatccagcttgatatgacattattatgtaaaagaggaacaggaataggcacataaaaataaattttattaatcatatgccgtttttgatgatttgcaatagtcactgagtaacttcacatctgtatgccttttgtaactttttaaagcctttccatggttttcctttgtctggacaccaaagtttgctatgttaggatattcttttgactatattgggctacacatctctgaaataaaataattcttgaattctgataacataaaacgcagatacaaaataatgtaggcattatatattgccccaaaaagtgatattttggtatcagttttaactactattttggggcttctctttttggccacatatggtccatcttaatgatcaaagtcttatcttatttcattatcctggtgagcaggctttgatggtgaggaaaggaaagattcctgtgagaagagcaggatgagcagagggattctatgcttgaagtcgagtcacttgaaaaagatctctttgaatgtggaagagatctgagcagatgaaaataaaatcaggaaaatgcaacatggcagcagcaatggaaacagaacagctgggtgttgagatatttgaaactgcggactgtgaggagaatattgaatcacaggatcggcctaaattggagcctttttatgttgagcggtattcctggagtcagcttaaaaagctgcttgccgataccagaaaatatcatggctacatgatggctaaggcaccacatgatttcatgtttgtgaagaggaatgatccagatggacctcattcagacagaatctattaccttgccatgtctggtgagaacagagaaaatacactgttttattctgaaattcccaaaactatcaatagagcagcagtcttaatgctctcttggaagcctcttttggatctttttcaggcaacactggactatggaatgtattctcgagaagaagaactattaagagaaagaaaacgcattggaacagtcggaattgcttcttacgattatcaccaaggaagtggaacatttctgtttcaagccggtagtggaatttatcacgtaaaagatggagggccacaaggatttacgcaacaacctttaaggcccaatctagtggaaactagttgtcccaacatacggatggatccaaaattatgccctgctgatccagactggattgcttttatacatagcaacgatatttggatatctaacatcgtaaccagagaagaaaggagactcacttatgtgcacaatgagctagccaacatggaagaagatgccagatcagctggagtcgctacctttgttctccaagaagaatttgatagatattctggctattggtggtgtccaaaagctgaaacaactcccagtggtggtaaaattcttagaattctatatgaagaaaatgatgaatctgaggtggaaattattcatgttacatcccctatgttggaaacaaggagggcagattcattccgttatcctaaaacaggtacagcaaatcctaaagtcacttttaagatgtcagaaataatgattgatgctgaaggaaggatcatagatgtcatagataaggaactaattcaaccttttgagattctatttgaaggagttgaatatattgccagagctggatggactcctgagggaaaatatgcttggtccatcctactagatcgctcccagactcgcctacagatagtgttgatctcacctgaattatttatcccagtagaagatgatgttatggaaaggcagagactcattgagtcagtgcctgattctgtgacgccactaattatctatgaagaaacaacagacatctggataaatatccatgacatctttcatgtttttccccaaagtcacgaagaggaaattgagtttatttttgcctctgaatgcaaaacaggtttccgtcatttatacaaaattacatctattttaaaggaaagcaaatataaacgatccagtggtgggctgcctgctccaagtgatttcaagtgtcctatcaaagaggagatagcaattaccagtggtgaatgggaagttcttggccggcatggatctaatatccaagttgatgaagtcagaaggctggtatattttgaaggcaccaaagactcccctttagagcatcacctgtacgtagtcagttacgtaaatcctggagaggtgacaaggctgactgaccgtggctactcacattcttgctgcatcagtcagcactgtgacttctttataagtaagtatagtaaccagaagaatccacactgtgtgtccctttacaagctatcaagtcctgaagatgacccaacttgcaaaacaaaggaattttgggccaccattttggattcagcaggtcctcttcctgactatactcctccagaaattttctcttttgaaagtactactggatttacattgtatgggatgctctacaagcctcatgatctacagcctggaaagaaatatcctactgtgctgttcatatatggtggtcctcaggtgcagttggtgaataatcggtttaaaggagtcaagtatttccgcttgaataccctagcctctctaggttatgtggttgtagtgatagacaacaggggatcctgtcaccgagggcttaaatttgaaggcgcctttaaatataaaatgggtcaaatagaaattgacgatcaggtggaaggactccaatatctagcttctcgatatgatttcattgacttagatcgtgtgggcatccacggctggtcctatggaggatacctctccctgatggcattaatgcagaggtcagatatcttcagggttgctattgctggggccccagtcactctgtggatcttctatgatacaggatacacggaacgttatatgggtcaccctgaccagaatgaacagggctattacttaggatctgtggccatgcaagcagaaaagttcccctctgaaccaaatcgtttactgctcttacatggtttcctggatgagaatgtccattttgcacataccagtatattactgagttttttagtgagggctggaaagccatatgatttacagatctatcctcaggagagacacagcataagagttcctgaatcgggagaacattatgaactgcatcttttgcactaccttcaagaaaaccttggatcacgtattgctgctctaaaagtgatataattttgacctgtgtagaactctctggtatacactggctatttaaccaaatgaggaggtttaatcaacagaaaacacagaattgatcatcacattttgatacctgccatgtaacatctactcctgaaaataaatgtggtgccatgcaggggtctacggtttgtggtagtaatctaataccttaaccccacatgctcaaaatcaaatgatacatattcctgagagacccagcaataccataagaattactaaaaaaaaaaaaaaaaaaaagacattagcaccatgtattcatactaccctattttcacttttaatagtattataaacttcatgaacttaattagtgtatttttacagtatacttttgagtttgttaaaatatgatgatattagtgattggtttggttcagttccagaatctttgactagttacagatttgatagcacttaaatgtaattgaatagcttatgcttcattgcttgggcatatccagcatgttatgaactaataactattaaacttgacttaaccagtcattcattaataatttttcaaggataacttagtggcctcctaaagacacttgttttggcactgaccagtttttagccaatttaatctgtatctagtataaataattctcatttttctttgatgatattaacagagtgggcttttccttttgcataaaggctagtaactgtatatgtagcatggatttaattagtcatgatattgataattacaggcagaaaatttttaatcaaatgattagagcttaaatatttgcaggcaagtttttttttttcctttaagaaaaggaaaaagtacacattcactagaattcttcagaaaatttagtggtgccagtttccatttggtatttccttattaaaatattctagaattttaaggagattgaagggaatcacagtggggtggggagacctgggtttggggaatgacagagagaagaggtggtgagggcctgattaaaaactaagcagaagtagttttaacaaaaatactcatgaaaatgtttggaaactgaaatttaaacaactgtaatattaaggaaaccagaatcaataaatcactgtcttgccagcacagctacagagtaacatgattcaggggaggaaaagttccttagagttacttttataattctttttttttttcctcttaggtttagaaatcttacaaatttaaactttatccttttaaaattatttgaacataatttagatattgtaagcttaaaatacaaatgtttatagataacctctttaccataaactaatccctggcaagccatggctctctttttttttttggtgtttaaagcctgtaaacagtttttctgaatgatcatgaacttttcttggtttagcactaggatttagctatgaagagagctcataggctttcaggtgctaattgagatctgccctgttagagtcttggggtgctagattggtcacattgacaccagtggcagggaaggcatctatgagtttgatgctttttatcacacacttcagtgtttagaaagttattaccaatacttttaaacaacactccaagaaaatttgctatatttctttctcatcactacagagagagtagatttccccatagagagcacagcctccattagtaaggttggtgactattggtaagaggtggacttcattgacaccaagtgggaggtagggaaagcccagaaatggcaggatgatatggtggttctgtcgttgggaaaggtattgggttttgctgtttgtatttatactgtataatagataccacgctttttcttattatctgtatatgtattgcttttcatgtttgatattttcccatgccaagatttgtttatatatattttcaatgttaaattaaattgatttgggtaacttt

SEQ ID NO: 7749 - protein, 898 aa, Homo sapiens; identical to SEQ ID NO: 1072

SEQ ID NO: 7750 - DNA, 4783 bp, Homo sapiens
ggatcgcaacgaaccggaagtgctaaagcctccgaggccaaggccgctgctactgccgccgctgcttcttagtgccgcgttcgccgcctgggttgtcaccggcgccgccgccgaggaagccactgcaaccaggaccggagtggaggcggcgcagcatgaagcggcgcaggcccgctccatagcgcacgtcgggacggtccgggcggggccggggggaaggctttgatggtgaggaaaggaaagattcctgtgagaagagcaggatgagcagagggattctatgcttgaagtcgagtcacttgaaaaagatctctttgaatgtggaagagatctgagcagatgaaaataaaatcaggaaaatgcaacatggcagcagcaatggaaacagaacagctgggtgttgagatatttgaaactgcggactgtgaggagaatattgaatcacaggatcggcctaaattggagcctttttatgttgagcggtattcctggagtcagcttaaaaagctgcttgccgataccagaaaatatcatggctacatgatggctaaggcaccacatgatttcatgtttgtgaagaggaatgatccagatggacctcattcagacagaatctattaccttgccatgtctggtgagaacagagaaaatacactgttttattctgaaattcccaaaactatcaatagagcagcagtcttaatgctctcttggaagcctcttttggatctttttcaggcaacactggactatggaatgtattctcgagaagaagaactattaagagaaagaaaacgcattggaacagtcggaattgcttcttacgattatcaccaaggaagtggaacatttctgtttcaagccggtagtggaatttatcacgtaaaagatggagggccacaaggatttacgcaacaacctttaaggcccaatctagtggaaactagttgtcccaacatacggatggatccaaaattatgccctgctgatccagactggattgcttttatacatagcaacgatatttggatatctaacatcgtaaccagagaagaaaggagactcacttatgtgcacaatgagctagccaacatggaagaagatgccagatcagctggagtcgctacctttgttctccaagaagaatttgatagatattctggctattggtggtgtccaaaagctgaaacaactcccagtggtggtaaaattcttagaattctatatgaagaaaatgatgaatctgaggtggaaattattcatgttacatcccctatgttggaaacaaggagggcagattcattccgttatcctaaaacaggtacagcaaatcctaaagtcacttttaagatgtcagaaataatgattgatgctgaaggaaggatcatagatgtcatagataaggaactaattcaaccttttgagattctatttgaaggagttgaatatattgccagagctggatggactcctgagggaaaatatgcttggtccatcctactagatcgctcccagactcgcctacagatagtgttgatctcacctgaattatttatcccagtagaagatgatgttatggaaaggcagagactcattgagtcagtgcctgattctgtgacgccactaattatctatgaagaaacaacagacatctggataaatatccatgacatctttcatgtttttccccaaagtcacgaagaggaaattgagtttatttttgcctctgaatgcaaaacaggtttccgtcatttatacaaaattacatctattttaaaggaaagcaaatataaacgatccagtggtgggctgcctgctccaagtgatttcaagtgtcctatcaaagaggagatagcaattaccagtggtgaatgggaagttcttggccggcatggatctaatatccaagttgatgaagtcagaaggctggtatattttgaaggcaccaaagactcccctttagagcatcacctgtacgtagtcagttacgtaaatcctggagaggtgacaaggctgactgaccgtggctactcacattcttgctgcatcagtcagcactgtgacttctttataagtaagtatagtaaccagaagaatccacactgtgtgtccctttacaagctatcaagtcctgaagatgacccaacttgcaaaacaaaggaattttgggccaccattttggattcagcaggtcctcttcctgactatactcctccagaaattttctcttttgaaagtactactggatttacattgtatgggatgctctacaagcctcatgatctacagcctggaaagaaatatcctactgtgctgttcatatatggtggtcctcaggtgcagttggtgaataatcggtttaaaggagtcaagtatttccgcttgaataccctagcctctctaggttatgtggttgtagtgatagacaacaggggatcctgtcaccgagggcttaaatttgaaggcgcctttaaatataaaatggttgctattgctggggccccagtcactctgtggatcttctatgatacaggatacacggaacgttatatgggtcaccctgaccagaatgaacagggctattacttaggatctgtggccatgcaagcagaaaagttcccctctgaaccaaatcgtttactgctcttacatggtttcctggatgagaatgtccattttgcacataccagtatattactgagttttttagtgagggctggaaagccatatgatttacagatctatcctcaggagagacacagcataagagttcctgaatcgggagaacattatgaactgcatcttttgcactaccttcaagaaaaccttggatcacgtattgctgctctaaaagtgatataattttgacctgtgtagaactctctggtatacactggctatttaaccaaatgaggaggtttaatcaacagaaaacacagaattgatcatcacattttgatacctgccatgtaacatctactcctgaaaataaatgtggtgccatgcaggggtctacggtttgtggtagtaatctaataccttaaccccacatgctcaaaatcaaatgatacatattcctgagagacccagcaataccataagaattactaaaaaaaaaaaaaaaaaaaagacattagcaccatgtattcatactaccctattttcacttttaatagtattataaacttcatgaacttaattagtgtatttttacagtatacttttgagtttgttaaaatatgatgatattagtgattggtttggttcagttccagaatctttgactagttacagatttgatagcacttaaatgtaattgaatagcttatgcttcattgcttgggcatatccagcatgttatgaactaataactattaaacttgacttaaccagtcattcattaataatttttcaaggataacttagtggcctcctaaagacacttgttttggcactgaccagtttttagccaatttaatctgtatctagtataaataattctcatttttctttgatgatattaacagagtgggcttttccttttgcataaaggctagtaactgtatatgtagcatggatttaattagtcatgatattgataattacaggcagaaaatttttaatcaaatgattagagcttaaatatttgcaggcaagtttttttttttcctttaagaaaaggaaaaagtacacattcactagaattcttcagaaaatttagtggtgccagtttccatttggtatttccttattaaaatattctagaattttaaggagattgaagggaatcacagtggggtggggagacctgggtttggggaatgacagagagaagaggtggtgagggcctgattaaaaactaagcagaagtagttttaacaaaaatactcatgaaaatgtttggaaactgaaatttaaacaactgtaatattaaggaaaccagaatcaataaatcactgtcttgccagcacagctacagagtaacatgattcaggggaggaaaagttccttagagttacttttataattctttttttttttcctcttaggtttagaaatcttacaaatttaaactttatccttttaaaattatttgaacataatttagatattgtaagcttaaaatacaaatgtttatagataacctctttaccataaactaatccctggcaagccatggctctctttttttttttggtgtttaaagcctgtaaacagtttttctgaatgatcatgaacttttcttggtttagcactaggatttagctatgaagagagctcataggctttcaggtgctaattgagatctgccctgttagagtcttggggtgctagattggtcacattgacaccagtggcagggaaggcatctatgagtttgatgctttttatcacacacttcagtgtttagaaagttattaccaatacttttaaacaacactccaagaaaatttgctatatttctttctcatcactacagagagagtagatttccccatagagagcacagcctccattagtaaggttggtgactattggtaagaggtggacttcattgacaccaagtgggaggtagggaaagcccagaaatggcaggatgatatggtggttctgtcgttgggaaaggtattgggttttgctgtttgtatttatactgtataatagataccacgctttttcttattatctgtatatgtattgcttttcatgtttgatattttcccatgccaagatttgtttatatatattttcaatgttaaattaaattgatttgggtaacttt

SEQ ID NO: 7751 - protein, 847 aa, Homo sapiens; identical to SEQ ID NO: 1074

SEQ ID NO: 7752 - DNA, 4803 bp, Homo sapiens
agcggatcgcaacgaaccggaagtgctaaagcctccgaggccaaggccgctgctactgccgccgctgcttcttagtgccgcgttcgccgcctgggttgtcaccggcgccgccgccgaggaagccactgcaaccaggaccggagtggaggcggcgcagcatgaagcggcgcaggcccgctccatagcgcacgtcgggacggtccgggcggggccggggggaaggaaaatgcaacatggcagcagcaatggaaacagaacagctgggtgttgagatatttgaaactgcggactgtgaggagaatattgaatcacaggatcggcctaaattggagcctttttatgttgagcggtattcctggagtcagcttaaaaagctgcttgccgataccagaaaatatcatggctacatgatggctaaggcaccacatgatttcatgtttgtgaagaggaatgatccagatggacctcattcagacagaatctattaccttgccatgtctggtgagaacagagaaaatacactgttttattctgaaattcccaaaactatcaatagagcagcagtcttaatgctctcttggaagcctcttttggatctttttcaggcaacactggactatggaatgtattctcgagaagaagaactattaagagaaagaaaacgcattggaacagtcggaattgcttcttacgattatcaccaaggaagtggaacatttctgtttcaagccggtagtggaatttatcacgtaaaagatggagggccacaaggatttacgcaacaacctttaaggcccaatctagtggaaactagttgtcccaacatacggatggatccaaaattatgccctgctgatccagactggattgcttttatacatagcaacgatatttggatatctaacatcgtaaccagagaagaaaggagactcacttatgtgcacaatgagctagccaacatggaagaagatgccagatcagctggagtcgctacctttgttctccaagaagaatttgatagatattctggctattggtggtgtccaaaagctgaaacaactcccagtggtggtaaaattcttagaattctatatgaagaaaatgatgaatctgaggtggaaattattcatgttacatcccctatgttggaaacaaggagggcagattcattccgttatcctaaaacaggtacagcaaatcctaaagtcacttttaagatgtcagaaataatgattgatgctgaaggaaggatcatagatgtcatagataaggaactaattcaaccttttgagattctatttgaaggagttgaatatattgccagagctggatggactcctgagggaaaatatgcttggtccatcctactagatcgctcccagactcgcctacagatagtgttgatctcacctgaattatttatcccagtagaagatgatgttatggaaaggcagagactcattgagtcagtgcctgattctgtgacgccactaattatctatgaagaaacaacagacatctggataaatatccatgacatctttcatgtttttccccaaagtcacgaagaggaaattgagtttatttttgcctctgaatgcaaaacaggtttccgtcatttatacaaaattacatctattttaaaggaaagcaaatataaacgatccagtggtgggctgcctgctccaagtgatttcaagtgtcctatcaaagaggagatagcaattaccagtggtgaatgggaagttcttggccggcatggatctaatatccaagttgatgaagtcagaaggctggtatattttgaaggcaccaaagactcccctttagagcatcacctgtacgtagtcagttacgtaaatcctggagaggtgacaaggctgactgaccgtggctactcacattcttgctgcatcagtcagcactgtgacttctttataagtaagtatagtaaccagaagaatccacactgtgtgtccctttacaagctatcaagtcctgaagatgacccaacttgcaaaacaaaggaattttgggccaccattttggattcagcaggtcctcttcctgactatactcctccagaaattttctcttttgaaagtactactggatttacattgtatgggatgctctacaagcctcatgatctacagcctggaaagaaatatcctactgtgctgttcatatatggtggtcctcaggtgcagttggtgaataatcggtttaaaggagtcaagtatttccgcttgaataccctagcctctctaggttatgtggttgtagtgatagacaacaggggatcctgtcaccgagggcttaaatttgaaggcgcctttaaatataaaatgggtcaaatagaaattgacgatcaggtggaaggactccaatatctagcttctcgatatgatttcattgacttagatcgtgtgggcatccacggctggtcctatggaggatacctctccctgatggcattaatgcagaggtcagatatcttcagggttgctattgctggggccccagtcactctgtggatcttctatgatacaggatacacggaacgttatatgggtcaccctgaccagaatgaacagggctattacttaggatctgtggccatgcaagcagaaaagttcccctctgaaccaaatcgtttactgctcttacatggtttcctggatgagaatgtccattttgcacataccagtatattactgagttttttagtgagggctggaaagccatatgatttacagatctatcctcaggagagacacagcataagagttcctgaatcgggagaacattatgaactgcatcttttgcactaccttcaagaaaaccttggatcacgtattgctgctctaaaagtgatataattttgacctgtgtagaactctctggtatacactggctatttaaccaaatgaggaggtttaatcaacagaaaacacagaattgatcatcacattttgatacctgccatgtaacatctactcctgaaaataaatgtggtgccatgcaggggtctacggtttgtggtagtaatctaataccttaaccccacatgctcaaaatcaaatgatacatattcctgagagacccagcaataccataagaattactaaaaaaaaaaaaaaaaaaaagacattagcaccatgtattcatactaccctattttcacttttaatagtattataaacttcatgaacttaattagtgtatttttacagtatacttttgagtttgttaaaatatgatgatattagtgattggtttggttcagttccagaatctttgactagttacagatttgatagcacttaaatgtaattgaatagcttatgcttcattgcttgggcatatccagcatgttatgaactaataactattaaacttgacttaaccagtcattcattaataatttttcaaggataacttagtggcctcctaaagacacttgttttggcactgaccagtttttagccaatttaatctgtatctagtataaataattctcatttttctttgatgatattaacagagtgggcttttccttttgcataaaggctagtaactgtatatgtagcatggatttaattagtcatgatattgataattacaggcagaaaatttttaatcaaatgattagagcttaaatatttgcaggcaagtttttttttttcctttaagaaaaggaaaaagtacacattcactagaattcttcagaaaatttagtggtgccagtttccatttggtatttccttattaaaatattctagaattttaaggagattgaagggaatcacagtggggtggggagacctgggtttggggaatgacagagagaagaggtggtgagggcctgattaaaaactaagcagaagtagttttaacaaaaatactcatgaaaatgtttggaaactgaaatttaaacaactgtaatattaaggaaaccagaatcaataaatcactgtcttgccagcacagctacagagtaacatgattcaggggaggaaaagttccttagagttacttttataattctttttttttttcctcttaggtttagaaatcttacaaatttaaactttatccttttaaaattatttgaacataatttagatattgtaagcttaaaatacaaatgtttatagataacctctttaccataaactaatccctggcaagccatggctctctttttttttttggtgtttaaagcctgtaaacagtttttctgaatgatcatgaacttttcttggtttagcactaggatttagctatgaagagagctcataggctttcaggtgctaattgagatctgccctgttagagtcttggggtgctagattggtcacattgacaccagtggcagggaaggcatctatgagtttgatgctttttatcacacacttcagtgtttagaaagttattaccaatacttttaaacaacactccaagaaaatttgctatatttctttctcatcactacagagagagtagatttccccatagagagcacagcctccattagtaaggttggtgactattggtaagaggtggacttcattgacaccaagtgggaggtagggaaagcccagaaatggcaggatgatatggtggttctgtcgttgggaaaggtattgggttttgctgtttgtatttatactgtataatagataccacgctttttcttattatctgtatatgtattgcttttcatgtttgatattttcccatgccaagatttgtttatatatattttcaatgttaaattaaattgatttgggtaacttt

SEQ ID NO: 7753 - protein, 882 aa, Homo sapiens; identical to SEQ ID NO: 1070

SEQ ID NO: 7754 - DNA, 4503 bp, Homo sapiens
agcggatcgcaacgaaccggaagtgctaaagcctccgaggccaaggccgctgctactgccgccgctgcttcttagtgccgcgttcgccgcctgggttgtcaccggcgccgccgccgaggaagccactgcaaccaggaccggagtggaggcggcgcagcatgaagcggcgcaggcccgctccatagcgcacgtcgggacggtccgggcggggccggggggaaggaaaatgcaacatggcagcagcaatggaaacagaacagctgggtgttgagatatttgaaactgcggactgtgaggagaatattgaatcacaggatcggcctaaattggagcctttttatgttgagcggtattcctggagtcagcttaaaaagctgcttgccgataccagaaaatatcatggctacatgatggctaaggcaccacatgatttcatgtttgtgaagaggaatgatccagatggacctcattcagacagaatctattaccttgccatgtctggtgagaacagagaaaatacactgttttattctgaaattcccaaaactatcaatagagcagcagtcttaatgctctcttggaagcctcttttggatctttttcaggcaacactggactatggaatgtattctcgagaagaagaactattaagagaaagaaaacgcattggaacagtcggaattgcttcttacgattatcaccaaggaagtggaacatttctgtttcaagccggtagtggaatttatcacgtaaaagatggagggccacaaggatttacgcaacaacctttaaggcccaatctagtggaaactagttgtcccaacatacggatggatccaaaattatgccctgctgatccagactggattgcttttatacatagcaacgatatttggatatctaacatcgtaaccagagaagaaaggagactcacttatgtgcacaatgagctagccaacatggaagaagatgccagatcagctggagtcgctacctttgttctccaagaagaatttgatagatattctggctattggtggtgtccaaaagctgaaacaactcccagtggtggtaaaattcttagaattctatatgaagaaaatgatgaatctgaggtggaaattattcatgttacatcccctatgttggaaacaaggagggcagattcattccgttatcctaaaacaggtacagcaaatcctaaagtcacttttaagatgtcagaaataatgattgatgctgaaggaaggatcatagatgtcatagataaggaactaattcaaccttttgagattctatttgaaggagttgaatatattgccagagctggatggactcctgagggaaaatatgcttggtccatcctactagatcgctcccagactcgcctacagatagtgttgatctcacctgaattatttatcccagtagaagatgatgttatggaaaggcagagactcattgagtcagtgcctgattctgtgacgccactaattatctatgaagaaacaacagacatctggataaatatccatgacatctttcatgtttttccccaaagtcacgaagaggaaattgagtttatttttgcctctgaatgcaaaacaggtttccgtcatttatacaaaattacatctattttaaaggaaagcaaatataaacgatccagtggtgggctgcctgctccaagtgatttcaagtgtcctatcaaagaggagatagcaattaccagtggtgaatgggaagttcttggccggcatggatctaatatccaagttgatgaagtcagaaggctggtatattttgaaggcaccaaagactcccctttagagcatcacctgtacgtagtcagttacgtaaatcctggagaggtgacaaggctgactgaccgtggctactcacattcttgctgcatcagtcagcactgtgacttctttataagtaagtatagtaaccagaagaatccacactgtgtgtccctttacaagctatcaagtcctgaagatgacccaacttgcaaaacaaaggaattttgggccaccattttggattcagcaggtcctcttcctgactatactcctccagaaattttctcttttgaaagtactactggatttacattgtatgggatgctctacaagcctcatgatctacagcctggaaagaaatatcctactgtgctgttcatatatggtggtcctcaggttgctattgctggggccccagtcactctgtggatcttctatgatacaggatacacggaacgttatatgggtcaccctgaccagaatgaacagggctattacttaggatctgtggccatgcaagcagaaaagttcccctctgaaccaaatcgtttactgctcttacatggtttcctggatgagaatgtccattttgcacataccagtatattactgagttttttagtgagggctggaaagccatatgatttacagatctatcctcaggagagacacagcataagagttcctgaatcgggagaacattatgaactgcatcttttgcactaccttcaagaaaaccttggatcacgtattgctgctctaaaagtgatataattttgacctgtgtagaactctctggtatacactggctatttaaccaaatgaggaggtttaatcaacagaaaacacagaattgatcatcacattttgatacctgccatgtaacatctactcctgaaaataaatgtggtgccatgcaggggtctacggtttgtggtagtaatctaataccttaaccccacatgctcaaaatcaaatgatacatattcctgagagacccagcaataccataagaattactaaaaaaaaaaaaaaaaaaaagacattagcaccatgtattcatactaccctattttcacttttaatagtattataaacttcatgaacttaattagtgtatttttacagtatacttttgagtttgttaaaatatgatgatattagtgattggtttggttcagttccagaatctttgactagttacagatttgatagcacttaaatgtaattgaatagcttatgcttcattgcttgggcatatccagcatgttatgaactaataactattaaacttgacttaaccagtcattcattaataatttttcaaggataacttagtggcctcctaaagacacttgttttggcactgaccagtttttagccaatttaatctgtatctagtataaataattctcatttttctttgatgatattaacagagtgggcttttccttttgcataaaggctagtaactgtatatgtagcatggatttaattagtcatgatattgataattacaggcagaaaatttttaatcaaatgattagagcttaaatatttgcaggcaagtttttttttttcctttaagaaaaggaaaaagtacacattcactagaattcttcagaaaatttagtggtgccagtttccatttggtatttccttattaaaatattctagaattttaaggagattgaagggaatcacagtggggtggggagacctgggtttggggaatgacagagagaagaggtggtgagggcctgattaaaaactaagcagaagtagttttaacaaaaatactcatgaaaatgtttggaaactgaaatttaaacaactgtaatattaaggaaaccagaatcaataaatcactgtcttgccagcacagctacagagtaacatgattcaggggaggaaaagttccttagagttacttttataattctttttttttttcctcttaggtttagaaatcttacaaatttaaactttatccttttaaaattatttgaacataatttagatattgtaagcttaaaatacaaatgtttatagataacctctttaccataaactaatccctggcaagccatggctctctttttttttttggtgtttaaagcctgtaaacagtttttctgaatgatcatgaacttttcttggtttagcactaggatttagctatgaagagagctcataggctttcaggtgctaattgagatctgccctgttagagtcttggggtgctagattggtcacattgacaccagtggcagggaaggcatctatgagtttgatgctttttatcacacacttcagtgtttagaaagttattaccaatacttttaaacaacactccaagaaaatttgctatatttctttctcatcactacagagagagtagatttccccatagagagcacagcctccattagtaaggttggtgactattggtaagaggtggacttcattgacaccaagtgggaggtagggaaagcccagaaatggcaggatgatatggtggttctgtcgttgggaaaggtattgggttttgctgtttgtatttatactgtataatagataccacgctttttcttattatctgtatatgtattgcttttcatgtttgatattttcccatgccaagatttgtttatatatattttcaatgttaaattaaattgatttgggtaacttt

SEQ ID NO: 7755 - protein, 782 aa, Homo sapiens; identical to SEQ ID NO: 1068

SEQ ID NO: 7756 - DNA, 3026 bp, Homo sapiens
gaggaagccgaggctctgagattccgagtcaaccaccgttcactgggcgccccttgagctctgggcgctggcctcctggcttccacgctttgatggtgaggaaaggaaagattcctgtgagaagagcaggatgagcagagggattctatgcttgaagtcgagtcacttgaaaaagatctctttgaatgtggaagagatctgagcagatgaaaataaaatcaggaaaatgcaacatggcagcagcaatggaaacagaacagctgggtgttgagatatttgaaactgcggactgtgaggagaatattgaatcacaggatcggcctaaattggagcctttttatgttgagcggtattcctggagtcagcttaaaaagctgcttgccgataccagaaaatatcatggctacatgatggctaaggcaccacatgatttcatgtttgtgaagaggaatgatccagatggacctcattcagacagaatctattaccttgccatgtctggtgagaacagagaaaatacactgttttattctgaaattcccaaaactatcaatagagcagcagtcttaatgctctcttggaagcctcttttggatctttttcaggcaacactggactatggaatgtattctcgagaagaagaactattaagagaaagaaaacgcattggaacagtcggaattgcttcttacgattatcaccaaggaagtggaacatttctgtttcaagccggtagtggaatttatcacgtaaaagatggagggccacaaggatttacgcaacaacctttaaggcccaatctagtggaaactagttgtcccaacatacggatggatccaaaattatgccctgctgatccagactggattgcttttatacatagcaacgatatttggatatctaacatcgtaaccagagaagaaaggagactcacttatgtgcacaatgagctagccaacatggaagaagatgccagatcagctggagtcgctacctttgttctccaagaagaatttgatagatattctggctattggtggtgtccaaaagctgaaacaactcccagtggtggtaaaattcttagaattctatatgaagaaaatgatgaatctgaggtggaaattattcatgttacatcccctatgttggaaacaaggagggcagattcattccgttatcctaaaacaggtacagcaaatcctaaagtcacttttaagatgtcagaaataatgattgatgctgaaggaaggatcatagatgtcatagataaggaactaattcaaccttttgagattctatttgaaggagttgaatatattgccagagctggatggactcctgagggaaaatatgcttggtccatcctactagatcgctcccagactcgcctacagatagtgttgatctcacctgaattatttatcccagtagaagatgatgttatggaaaggcagagactcattgagtcagtgcctgattctgtgacgccactaattatctatgaagaaacaacagacatctggataaatatccatgacatctttcatgtttttccccaaagtcacgaagaggaaattgagtttatttttgcctctgaatgcaaaacaggtttccgtcatttatacaaaattacatctattttaaaggaaagcaaatataaacgatccagtggtgggctgcctgctccaagtgatttcaagtgtcctatcaaagaggagatagcaattaccagtggtgaatgggaagttcttggccggcatggatctaatatccaagttgatgaagtcagaaggctggtatattttgaaggcaccaaagactcccctttagagcatcacctgtacgtagtcagttacgtaaatcctggagaggtgacaaggctgactgaccgtggctactcacattcttgctgcatcagtcagcactgtgacttctttataagtaagtatagtaaccagaagaatccacactgtgtgtccctttacaagctatcaagtcctgaagatgacccaacttgcaaaacaaaggaattttgggccaccattttggattcagcaggtcctcttcctgactatactcctccagaaattttctcttttgaaagtactactggatttacattgtatgggatgctctacaagcctcatgatctacagcctggaaagaaatatcctactgtgctgttcatatatggtggtcctcaggtgcagttggtgaataatcggtttaaaggagtcaagtatttccgcttgaataccctagcctctctaggttatgtggttgtagtgatagacaacaggggatcctgtcaccgagggcttaaatttgaaggcgcctttaaatataaaatgggtcaaatagaaattgacgatcaggtggaaggactccaatatctagcttctcgatatgatttcattgacttagatcgtgtgggcatccacggctggtcctatggaggatacctctccctgatggcattaatgcagaggtcagatatcttcagggttgctattgctggggccccagtcactctgtggatcttctatgatacaggatacacggaacgttatatgggtcaccctgaccagaatgaacagggctattacttaggatctgtggccatgcaagcagaaaagttcccctctgaaccaaatcgtttactgctcttacatggtttcctggatgagaatgtccattttgcacataccagtatattactgagttttttagtgagggctggaaagccatatgatttacagatctatcctcaggagagacacagcataagagttcctgaatcgggagaacattatgaactgcatcttttgcactaccttcaagaaaaccttggatcacgtattgctgctctaaaagtgatataattttgacctgtgtagaactctctggtatacactggctatttaaccaaatgaggaggtttaatcaacagaaaacacagaattgatcatcacattttgatacctgccatgtaacatctactcctgaaaataaatgtggtgccatgc

SEQ ID NO: 7757 - protein, 898 aa, Homo sapiens; identical to SEQ ID NO: 1072

SEQ ID NO: 7758 - DNA, 561 bp, Homo sapiens
gcgttcgccgcctgggttgtcaccggcgccgccgccgaggaagccactgcaaccaggaccggagtggaggcggcgcagcatgaagcggcgcaggcccgctccatagcgcacgtcgggacggtccgggcggggccggggggaaggaaaatgcaacatggcagcagcaatggaaacagaacagctgggtgttgagatatttgaaactgcggactgtgaggagaatattgaatcacaggatcggcctaaattggagcctttttatgttgagcggtattcctggagtcagcttaaaaagctgcttgccgataccagaaaatatcatggctacatgatggctaaggcaccacatgatttcatgtttgtgaagaggaatgatccagatggacctcattcagacagaatctattaccttggtaacaagtcattaattgatcatgatcgtttttcaaaatcgaagatgccagaaattgcttcttcctaaagctagcttgaaatgcctttctttagatggtctgattaggaaaacaaacaataaaaccattagtttgttcccactcaaca

SEQ ID NO: 7759 - protein, 108 aa, Homo sapiens
MAAAMETEQLGVEIFETADCEENIESQDRPKLEPFYVERYSWSQLKKLLADTRKYHGYMMAKAPHDFMFVKRNDPDGPHSDRIYYLGNKSLIDHDRFSKSKMPEIASS

SEQ ID NO: 7760 - DNA, 1237 bp, Homo sapiens
gtcactgcgcaggcgcggcccgcgagcgtggggtatctcgaggtgccgggttgcaggcgctcaggagcgctagggtttgaggcctgctttctgctcgcgccagcagagcactacctgaggcagcgaggcgcagcgagcctagcctccccgcgccctgggcagtgtggccatggagaatcaggtgttgacgccgcatgtctactgggctcagcgacaccgcgagctatatctgcgcgtggagctgagtgacgtacagaaccctgccatcagcatcactgaaaacgtgctgcatttcaaagctcaaggacatggtgccaaaggagacaatgtctatgaatttcacctggagttcttagaccttgtgaaaccagagcctgtttacaaactgacccagaggcaggtaaacattacagtacagaagaaagtgagtcagtggtgggagagactcacaaagcaggaaaagcgaccactgtttttggctcctgactttgatcgttggctggatgaatctgatgcggaaatggagctcagagctaaggaagaagagcgcctaaataaactccgactggaaagcgaaggctctcctgaaactcttacaaacttaaggaaaggatacctgtttatgtataatcttgtgcaattcttgggattctcctggatctttgtcaacctgactgtgcgattctgtatcttgggaaaaggcaatccttttatgacacattccatactgtggctgacatgatgtatttctgccagatgctggcagttgtggaaactatcaatgcagcaattggagtcactacgtcaccggtgctgccttctctgatccagcttcttggaagaaattttattttgtttatcatctttggcaccatggaagaaatgcagaacaaagctgtggttttctttgtgttttatttgtggagtgcaattgaaattttcaggtactctttctacatgctgacgtgcattgacatggattggaaggtgctcacatggcttcgttacactctgtggattcccttatatccactgggatgtttggcggaagctgtctcagtgattcagtccattccaatattcaatgagaccggacgattcagtttcacattgccatatccagtgaaaatcaaagttagattttccttttttcttcagatttatcttataatgatatttttaggtttatacataaattttcgtcacctttataaacagcgcagacggcgctatggac

SEQ ID NO: 7761 - protein, 190 aa, Homo sapiens
MENQVLTPHVYWAQRHRELYLRVELSDVQNPAISITENVLHFKAQGHGAKGDNVYEFHLEFLDLVKPEPVYKLTQRQVNITVQKKVSQWWERLTKQEKRPLFLAPDFDRWLDESDAEMELRAKEEERLNKLRLESEGSPETLTNLRKGYLFMYNLVQFLGFSWIFVNLTVRFCILGKGNPFMTHSILWLT

SEQ ID NO: 7762 - DNA, 1397 bp, Homo sapiens
gtcactgcgcaggcgcggcccgcgagcgtggggtatctcgaggtgccgggttgcaggcgctcaggagcgctagggtttgaggcctgctttctgctcgcgccagcagagcactacctgaggcagcgaggcgcagcgagcctagcctccccgcgccctgggcagtgtggccatggagaatcaggtgttgacgccgcatgtctactgggctcagcgacaccgcgagctatatctgcgcgtggagctgagtgacgtacagaaccctgccatcagcatcactgaaaacgtgctgcatttcaaagctcaaggacatggtgccaaaggagacaatgtctatgaatttcacctggagttcttagaccttgtgaaaccagagcctgtttacaaactgacccagaggcaggtaaacattacagtacagaagaaagtgagtcagtggtgggagagactcacaaagcaggaaaagcgaccactgtttttggctcctgactttgatcgttggctggatgaatctgatgcggaaatggagctcagagctaaggaagaagagcgcctaaataaactccgactggaaagcgaaggctctcctgaaactcttacaaacttaaggaaaggatacctgtttatgtataatcttgtgcaattcttgggattctcctggatctttgtcaacctgactgtgcgattctgtatcttgggaaaaggcaatccttttatgacacattccatactgtggctgacatgatgtatttctgccagatgctggcagttgtggaaactatcaatgcagcaattggagtcactacgtcaccggtgctgccttctctgatccagcttcttggaagaaattttattttgtttatcatctttggcaccatggaagaaatgcagaacaaagctgtggttttctttgtgttttatttgtggagtgcaattgaaattttcaggtactctttctacatgctgacgtgcattgacatggattggaaggtgctcacatggcttcgttacactctgtggattcccttatatccactgggatgtttggcggaagctgtctcagtgattcagtccattccaatattcaatgagaccggacgattcagtttcacattgccatatccagtgaaaatcaaagttagattttccttttttcttcagatttatcttataatgatatttttaggtttatacataaattttcgtcacctttataaacagcgcagacggcgctatggacaaaaaaagaaaaagatccactaaaaagaaagatttagatggcttcttgccagtttgagcctaatctgattcttacagttttaccttcttgaaccaatgtaaaagtttttttaatgttaaatgattaaattctcagtgaggctatcttccttttccccagt

SEQ ID NO: 7763 - protein, 190 aa, Homo sapiens; identical to SEQ ID NO: 7761

SEQ ID NO: 7764 - DNA, 3236 bp, Homo sapiens
gtcactgcgcaggcgcggcccgcgagcgtggggtatctcgaggtgccgggttgcaggcgctcaggagcgctagggtttgaggcctgctttctgctcgcgccagcagagcactacctgaggcagcgaggcgcagcgagcctagcctccccgcgccctgggcagtgtggccatggagaatcaggtgttgacgccgcatgtctactgggctcagcgacaccgcgagctatatctgcgcgtggagctgagtgacgtacagaaccctgccatcagcatcactgaaaacgtgctgcatttcaaagctcaaggacatggtgccaaaggagacaatgtctatgaatttcacctggagttcttagaccttgtgaaaccagagcctgtttacaaactgacccagaggcaggtaaacattacagtacagaagaaagtgagtcagtggtgggagagactcacaaagcaggaaaagcgaccactgtttttggctcctgactttgatcgttggctggatgaatctgatgcggaaatggagctcagagctaaggaagaagagcgcctaaataaactccgactggaaagcgaaggctctcctgaaactcttacaaacttaaggaaaggatacctgtttatgtataatcttgtgcaattcttgggattctcctggatctttgtcaacctgactgtgcgattctgtatcttgggaaaaggcaatccttttatgacacattccatactgtggctgacatgatgtatttctgccagatgctggcagttgtggaaactatcaatgcagcaattggagtcactacgtcaccggtgctgccttctctgatccagcttcttggaagaaattttattttgtttatcatctttggcaccatggaagaaatgcagaacaaagctgtggttttctttgtgttttatttgtggagtgcaattgaaattttcaggtactctttctacatgctgacgtgcattgacatggattggaaggtgctcacatggcttcgttacactctgtggattcccttatatccactgggatgtttggcggaagctgtctcagtgattcagtccattccaatattcaatgagaccggacgattcagtttcacattgccatatccagtgaaaatcaaagttagattttccttttttcttcagatttatcttataatgatatttttaggtttatacataaattttcgtcacctttataaacagcgcagacggcgctatggacaaaaaaagaaaaagatccactaaaaagaaagatttagatggcttcttgccagtttgagcctaatctgattcttacagttttaccttcttgaaccaatgtaaaagtttttttaatgttaaatgattaaattctcagtgaggctatcttccttttccccagtaacattcctgaatttactgttatcttattgtagtacttgcatgacatggattcctgatatctgatgagaggttcattcttgtgtattcagttaatgacaccaaaaggctcagcccaccccaaccctatctcatgttcagtctgtctaatacatgccagagatttttttttcaaaaagtgctttatccctacaatgtactgacagttcttacagttgagatttgttcttttcagctattgcttgtgaaaaaaagcaagactatgtcactctatagaaggctgttaaagtgactcaggcaggaattaattattctgtacctaaggggttacttgtttaatgggatggcattgactttttgaaaatcaagtggactgagtcattgataaaacatttctaagagtggggctagagaacatactttacatctgacatcctttggcctaacaacatctattattatagtgctcagcagtgtgggcattgaagaggcgcagaatgctttgaaagaaactaatcagaatcttggaacatcatgatcatgccattcttaagtaaatcaactattttcaacactgaagaaaaatgaaacattatttagaaaacaatgagattacaagttccaaactcagccaggaatgtggctcacacctgtaatcccagcactttgggacacctaggtgggagcatcgcttgaagccaggagttcaagaccagcttgggcaacgtagtgagacccctatctctacaaaaaataaaaaaattagctgggtgtgatggcacacacctgttgtcccagctactcaagaagctgagatgggaggatcctgagctcaggaggtcaaggctgcagtgagccgagattgtgccactgcactgcagctggggtgacagtgcaagaccctgtctcaaaccaaaccaaaccacacacacacaaacacacatacacacacacacacacgaggtccaaatggtagcagggatccaaagggaacacagtatgtaggtcaaactggcagtaacagtgtacagcctttgacaaactagaaatattagagtaggccaaacacacctccaaactgtaaggctgtgcacaaacataaaaaatggcagccttccatctcctgcactggctgagtccatttacttgtgtacttgttctagtgagtggtgggactgtacatttttgaatagacctcaaaaatacttcattctgctgctgttcagttggctttttaaacctgtctgcagtaggacactgaaaacagcaagaacttcggggtgaacacccgctgatcctttaacaaggatttctggcaggaaactcacaaaaaggagaactgaaaatttagacatacagttggccattgtaaaaaacatcagtttcctctcatacattccaagtaaaccaagtaaaataagtgttggagtaacacttgcataaaagaatttaaggagtgatagctctttctgttctgccattcccaacattcctgggggaaaggagactcaatgagttaatactatttcactgagcccaagatggaaacttggtttgacctaaaacatctgattaatataggctagctgatttcttaaaaattcgttgcattgaaggatattttgcatgtctgtaacacctgtcaatacttgtttgtattgatttctgatattcttgcagctgactacgtgtaattgggcagatcagctttgcagtagattatgctgcatcctcgtggcaaaattctgtattcttagtgattgttacaaacccctttattgctgtctgagaaagtgaaagattgtgtatttctattaaaacatttacaatcaaaattctaa

SEQ ID NO: 7765 - protein, 190 aa, Homo sapiens; identical to SEQ ID NO: 7761

SEQ ID NO: 7766 - DNA, 476 bp, Homo sapiens
gtgccgggttgcaggcgctcaggagcgctagggtttgaggcctgctttctgctcgcgccagcagagcactacctgaggcagcgaggcgcagcgagcctagcctccccgcgccctgggcagtgtggccatggagaatcaggtgttgacgccgcatgtctactgggctcagcgacaccgcgagctatatctgcgcgtggagctgagtgacgtacagaaccctgccatcagcatcactgaaaacgtgctgcatttcaaaggtcagtatcccagcaaatgctcccatctctatacacagttaaggaggtgtggtggtggtttcccttttttaaaaaaatgtatttgtcttacttgttttttgctgatgttcacgcctctgatcctcatgaggtaagctaaattgttttgaaatatatgattagaaaagtcaaagaattggtttaaaatcctgtttcccccatggagaggcagtagataca

SEQ ID NO: 7767 - protein, 87 aa, Homo sapiens
MENQVLTPHVYWAQRHRELYLRVELSDVQNPAISITENVLHFKGQYPSKCSHLYTQLRRCGGGFPFLKKCICLTCFLLMFTPLILMR

SEQ ID NO: 7768 - DNA, 8192 bp, Homo sapiens
ggcctgtctgtccagattcttctcagcctctctgtgcagtgttccctcctccagagtatgaggcaagaccctctctggaatgagggtcttaggacccacaatcagattagagtcgtgccttgggcagctgaaaggaaggcagggaaggtcatagagggagattctgttgtctgaggcctaaagtgtcccaacattataacaaaaaactgtaacaagggctgtgggagttataagccagaaaccgttgccgaaaacctatatatacatatacacatatcataatatcacaccaggggtaatatttttttcttgggtttgttatgtctgtatacctattcttcaaggctgggaaaggaagtcctgctgaaaatacatgctggagagcaatgttccttgtatgtttctctgtgggagtaggagcccaggctggtgaggacctggaccaggtatttgtgtgggagcttaggagcattcaggaaggaaaaagggttgaagtcatccagatatgcctcatacacctgtctcctgctgggactattgcttttaatagcttactgctttgctttgctttacagctcttacaaacttaaggaaaggatacctgtttatgtataatcttgtgcaattcttgggattctcctggatctttgtcaacctgactgtgcgattctgtatcttgggaaaaggcaagtaagacatttttggattaattttccctttctcagtagtttggcccagtattcaccaaagggagcactctctgcctttgatgttaataataacccctgcatttgtgcagcaccctctacttttcgttgtgctttcatagctcttatttcccatggccttgtgaaataagctgactggtattctttccatataacaggtaataaaatataggcctagagatggtcaaaaatggttcacatccatagctagccagagccacatcttgggctagaatccttttgtaaaaatgttcactaacaactaaataaattgatgtgatacttccagtgccaaagttatgcaaggccaaaagggttctcacccttttggagcctaaatacgttctaaaatgaactattctaaaacagaataaaaagagcatcataaagatattagttcttcttaaattaatttatgtgtttagcaggattctggctttgaccagtggcattccattggtaaatgccaatgggaaatttttgagaatttgatctaaagtattctgaaactttatttgatgaataaataggtaataaaatttaggagaagaaagattaatgggagaggatttttctacctgataatgaaagtatggaccaggtgtagtagctcatacctgtaatcccagcactttaacaggctgaagtggaaggatctcttgcgcccaggaggttgaagctgcagtaagccgtgatcatgacactgtactctagactgggtgatggagcaagaccttgactcttaaaaaaatttagaaaggtggctgtgcgtggtggctcacgcctgtaatcccagtactttgggaggtctaggtgggcagatcacgaggtcaagagatcgagaccatcctggtcaacatggtgaaacccccatctctactaaaattacaaaaattagctgggcatggtggtgcgtgcctgtagtcccagctactcgggaggctgaggcaggagaatcacttgaacccaggaggcgggggttgcagtgagccaagatcgtgccactgcactgcagcctggtgacagagtaagactccatctcaaaaaaaaaaaagagaaaggcatataaggtgtacgtgttaactttctggtaactggtagagcttactattcatgaccccattggcctgcacccttcctgcttagttaagtaagaaacttgaatctgactggatgtttgttattcctttcttacagttattttcacgaaaggagtaatctagtttgagaaatagttctgttggaatttaccaactgattcacccttaatgtatatttttgcctatagagtccttttatgacacattccatactgtggctgacatgatgtatttctgccagatgctggcagttgtggaaactatcaatgcagcaattggagtcactacgtcaccggtgctgccttctctgatccaggtattgaatagttaagctgaagggtgggtaatggaaggtcccattatttgtctagtgggtatgtgtattagtccattttcatgctgctcataaagacatacctgagactgggcagtttacaaaagaaagaggtttaattggacttacagttccatgtggctgggaaggtctcacgatcatggtggagggcgaaaggcacttcttacgtggtggcggcaagagagaatgaggaagaagcaaaagcagaaactcctgataaacccatcagatctcgtgagacttattcactatcctgagaatagcatgggaaagaccggccgcactgattcatttacctccccctaggtccctgccacaacacgtgggaatcctgggagatacaattaaagttgaaatttgaatggggacacagccaaaccatatcattctagccgtggcccctccaaatctcataccctcacatttcaaaaccaatcatgccttctcaacagtcccccaaagtcttatttcagcattaaccccaaagtccacagtccaaagtctcatctgagacaaggcaagtcccttctgcctttgagcctgtaaaatcaaagcacactagttacttcctagatacaaggggagtactggcattgggtaaatacagccgttccaaatgggagaaattggccaaaataaaggggttacagtgcccatgcaagtctgaaatccagtggggcggtcaaactttaaagctccaaaatgatctcctttgactccaggtctcacatccaggtcacgctgatgcaaaaggtgggttcccatggtcttaggcagctccactcctgtgactttgcagggagcagcctccctcccggctgctttcaccggctggcattgagtgtctgcagcttttccaggtgcatggtgcaagctgtcagtggatctaccactttggggtctggaggatggcggcctcttctcacagctccactaggcagtgccccagtagggattctgtgtgggggctccaaccccatgtttcccttcctcactgccctagcagaggttctccatgagggccccatccctgcagcaaacttttgcctgggcatccaggcatttccatacatcttctgaaatctgggcggaggtttccaaacctcaattcttgacttctctgcacccacaggctcaccaccacgtggaagctgccaaggcttggggcttgcaccctctgaagccacagcctgagctgtacattggcccctctcagccaaggctggagcagctgggacacagggcaccaaatccctaggttgcacacagcacagggaccctgggcctccgcgcctgtgatgggagggactgccatgaaggcctctgacatggtctggttacattttccccatggtcttggggattacattggggattacgttaggctccttgctacttgtgcaaatttctgcagccagcttgaggttctcctcaaaaaatgggtttttcttttctactgaatcatcaggctgcaaattttccaaacttttatgctgtttctcttttaaaacggaatgcttttaacagcacccaagtcacctcttgaatgcttttctgcttagaaatttctcctgccagataccctaaatcatctctctcaagttcagagttctacagatctctagggcaggggcaaaatgctgccagtctctttgctaaaatataacaagagtcacctttgctccagttcacctttgcttccaagaggttcttcatctccatctgagactacctcagcctggactttattgttcatatcactatcagcatttttgtcgaagccattcaacaaatctctacgaggttccaaacttacctacattttcctatcttcttctgagccctccaaactgttccaacctctgtctgttacccagttccaaggtcacttccacattttcgggtatcttttcagcaacatccaactttactggtaccaatttactgtattagtccgttttcccactgctgataaagacatacctgaaaccaggccgtttacaaaagaaagaggtttaattggatttacagttccatgtggcgggggaaggtctcacaattgtggtgcagggcaaaaggcacttcttacatggcggtggcaagagagaatgaggaagaaacaaaagcggaaacccctgataagcccgccagatcttgtgagacttatttactaacatgggaatagcacgggaagaccagcccccatgattcagttacctccccctgggtcccttccacaacatgtgggaattctaggagatacaattcaagctgacatttgaatggggacacagccaaaccatatctgtatgttacattttgctaagaagtctcaattagtaaaaacacctatttgtacaggaatagcattattttacctgaacaagaaagaacatttaaaaccccagggttatttaccaaagtagacttttactatttcaggtctttttcattttttataatatccttatgaaatcacaaagttataaagagctttaagactagggaaatttgactcttaggcaggagctgaaaaacctaccttcagtctccttagttagaaatgtatgtggtctcctcccaccttgtgtagatgaaggcagtacttcttaaaaacttgtattaatgaaaagtacaataatcaaactttaaaatttacagccaggcatggtggctcattcctgtaatccccatactttgggaagctgaggtaggaggattgcttgaggccagcagttggagaccacccttggcagcatagtgagaccccatttctaaaaaaataaaaatttgccaggcatggtgatgtgcacctatattcccactacttgggaggctgagacggaaggattccttgagtgcaggagttcgatgttgcagtgagctgggattgtgccactgccctccaacctgggcagcagagcgagacccctgtctctaaaaaaaataaaaaataaaaatttaatggatagtttgtgttgtagattagacatagctgaagagaaaattagtgaactgttttgagatacaggaaggaatagagagcacaaaaagtaaatatacagacgtaattttcttgaattataagactcaatattataatattgttagttctcatatttccctgtagattcaatacatttccaatcacaatctaaaaaattttggaatgtgaggagaaaattctgaagctttttgaaaaaacagagggccatccaggatagtagcatcattttcgataactaaaatgtgcaagcaacccaagtgttcatctacagatgaatggataagaatgactgttacatacatacaatgggatattatgtagccttaaaaatgaaagaaattctctcgtatgctacaatgtggatgaaccttaaggaaactatgctaagtgaaataagccagtcacagaaagtcaaatactagatgattctgcttacatggggtacttaaaatagtcaaaaccatagagacagaaagtaggatggtgtttgccaggggctggctgaatggggagttattgtttaatgggtcatagtttctttcttttttttttttttgagagtctcgcctgcactccagcctggacgacagagcgagactctgtctcaaaaaaaaaaaaaacaagaccaaaaaacatagatgagtctctggcccgtaactctgagtaagaagtagtcacagaatgatacatatagaatgatttcagaaagttttaaaacaggcaaaatgaaacaatatactgttcaggaatacatacacaagcagtaattcataaagaaaagccatgggccaggcacagtggctcatgcctataatcccagcactctgggaggctgacgcaagaggatcacttgagcccaagagtttgagcaagcttggccaacacagtgagaccccgtctctacaaaaaaataaaattagccagtgtggtagtacacacacctgtgatcccagctacttgagaggctgaagtgggaggattgcttgagcccagaagttcaaggctgcagtgagccatgattgcaccactgcactccagcccgggtgacggagcgagaccccgtctcgataaaaaagaaaagccatggaattattaacacatgatagtagttatttataggggtcccacgtttgtagtgctctatttcttaacttgggttatataaactcaaatgtttatttggcagtattctttagactgcgtttgaacatgtgtctgtattttaaagaaatgatttatgatatagttacacaaaatactgtacctgtctagtcacaaagactggtttgggcactttacttgttccagaactggagcaggattaaactggtcgaggtcaatcttttctatttgccttgcatttagtggggttagatttcagataacacatttctataactttacatatattttattaacttttttctctcttttgggtctttctaatagcttcttggaagaaattttattttgtttatcatctttggcaccatggaagaaatgcagaacaaagctgtggttttctttgtgttttatttgtggagtgcaattgaaattttcaggtgggtagaaatgccaggatggtgtttgaatgctgctccctgtttgcagcagctctgttcttgagggagttgttatcttagccagagtctcatttggtttgggactaagattacatatgtggagaattctggttgcacctatgtgctctgcaaagttgagacagatttttttaaagccgtcattggatcataataccagactggatactagggagcagaagaggagaaccagagaaagggaagactcatcttaccatgacttcaggatcttgcagtcttggaaagagaggacccatccacatggaaaaattcttgaaagggctgaagaaacaggaggttgaaggagcaatccaggttggatagaactaatttaagactaaatttctacaagggatgatagaaatgaatcttataccacaagattattgaagtttgaaatggcctctaacccaattttcccgttctcggttgttagtagcataaatatcttttaagaaatggatctagttaaagtagatgtattcttctttaccagaccatacacactccatatgtcttccctttcagtcagctggagcaaggattttgcaaatgaacttctcagctccaggtttggtggtattttgacaaagttgctagttgagagagagaacaggccatagcagccttaaattgtgtcttaaccatggtctgtgtcccatggcacccagtgtaccctctaatagccttaatacaaaggtaaaacagattataggtcctatgtttttcaaatcagacacgtaatgtgctgatgtaacaaggtttgagggaagcacatctcacacaggagagtgaaaatccagttatcacacttatgagctataaaaggatcagattatgggtccttaatgcaatgtttactgtttgagaaggaacatttattttctcaagggatgtcttttaaaatagcatatgtctgattctagattagaggtcttctgtatactttaattttggtaacaactcacttatccagaaataaagtatctaatatccttacccaccgggaatgtatatcagcactaggaataaagccaaaaaacatctgagtatccagtccgtttaccgaataaagagggttcctttgagacctaaacttagtctgccattaaagagcgttcagatcctttgaaaatttagggcgcagtgtggcaggagtttatgggttgatagccagcgttataattctgttctgaagaagccatgtgtggctgagaaatagaattcttctatttaaatgatattctaaggttgcattcggaacctgaagtggcttttcacattggaatcatttattttcaataggtactctttctacatgctgacgtgcattgacatggattggaaggtgctcacatggcttcgttacactctgtggattcccttatatccactgggatg

SEQ ID NO: 7769 - protein, 53 aa, Homo sapiens
MGSYCLMGHSFFLFFFFESLACTPAWTTERDSVSKKKKTRPKNIDESLARNSE

SEQ ID NO: 7770 - DNA, 500 bp, Homo sapiens
tctgctccaagctcactcttgtggctgttgacaggaagcttcagtttcttgccatagcccgtctccatatggctactcatggcatggcttcccccaaagcaattggttagagagagagagcccgaagccacagtgcctaatctcagaagtgacaaatcatcacacagaccaacccagtataacatgggaggggactacacaaaggtatgaaataacaggagatagaggttgttgggatcattgtcacggcttgctaccccagacagtgagaggaagaccacgcaaggtttatacataaattttcgtcacctttataaacagcgcagacggcgctatggacaaaaaaagaaaaagatccactaaaaagaaagatttagatggcttcttgccagtttgagcctaatctgattcttacagttttaccttcttgaaccaatgtaaaagtttttttaatgttaaatgattaaattctcagtgaggctatcttccttttccccagt

SEQ ID NO: 7771 - protein, 43 aa, Homo sapiens
MAWLPPKQLVREREPEATVPNLRSDKSSHRPTQYNMGGDYTKV

SEQ ID NO: 7772 - DNA, 2339 bp, Homo sapiens
tctgctccaagctcactcttgtggctgttgacaggaagcttcagtttcttgccatagcccgtctccatatggctactcatggcatggcttcccccaaagcaattggttagagagagagagcccgaagccacagtgcctaatctcagaagtgacaaatcatcacacagaccaacccagtataacatgggaggggactacacaaaggtatgaaataacaggagatagaggttgttgggatcattgtcacggcttgctaccccagacagtgagaggaagaccacgcaaggtttatacataaattttcgtcacctttataaacagcgcagacggcgctatggacaaaaaaagaaaaagatccactaaaaagaaagatttagatggcttcttgccagtttgagcctaatctgattcttacagttttaccttcttgaaccaatgtaaaagtttttttaatgttaaatgattaaattctcagtgaggctatcttccttttccccagtaacattcctgaatttactgttatcttattgtagtacttgcatgacatggattcctgatatctgatgagaggttcattcttgtgtattcagttaatgacaccaaaaggctcagcccaccccaaccctatctcatgttcagtctgtctaatacatgccagagatttttttttcaaaaagtgctttatccctacaatgtactgacagttcttacagttgagatttgttcttttcagctattgcttgtgaaaaaaagcaagactatgtcactctatagaaggctgttaaagtgactcaggcaggaattaattattctgtacctaaggggttacttgtttaatgggatggcattgactttttgaaaatcaagtggactgagtcattgataaaacatttctaagagtggggctagagaacatactttacatctgacatcctttggcctaacaacatctattattatagtgctcagcagtgtgggcattgaagaggcgcagaatgctttgaaagaaactaatcagaatcttggaacatcatgatcatgccattcttaagtaaatcaactattttcaacactgaagaaaaatgaaacattatttagaaaacaatgagattacaagttccaaactcagccaggaatgtggctcacacctgtaatcccagcactttgggacacctaggtgggagcatcgcttgaagccaggagttcaagaccagcttgggcaacgtagtgagacccctatctctacaaaaaataaaaaaattagctgggtgtgatggcacacacctgttgtcccagctactcaagaagctgagatgggaggatcctgagctcaggaggtcaaggctgcagtgagccgagattgtgccactgcactgcagctggggtgacagtgcaagaccctgtctcaaaccaaaccaaaccacacacacacaaacacacatacacacacacacacacgaggtccaaatggtagcagggatccaaagggaacacagtatgtaggtcaaactggcagtaacagtgtacagcctttgacaaactagaaatattagagtaggccaaacacacctccaaactgtaaggctgtgcacaaacataaaaaatggcagccttccatctcctgcactggctgagtccatttacttgtgtacttgttctagtgagtggtgggactgtacatttttgaatagacctcaaaaatacttcattctgctgctgttcagttggctttttaaacctgtctgcagtaggacactgaaaacagcaagaacttcggggtgaacacccgctgatcctttaacaaggatttctggcaggaaactcacaaaaaggagaactgaaaatttagacatacagttggccattgtaaaaaacatcagtttcctctcatacattccaagtaaaccaagtaaaataagtgttggagtaacacttgcataaaagaatttaaggagtgatagctctttctgttctgccattcccaacattcctgggggaaaggagactcaatgagttaatactatttcactgagcccaagatggaaacttggtttgacctaaaacatctgattaatataggctagctgatttcttaaaaattcgttgcattgaaggatattttgcatgtctgtaacacctgtcaatacttgtttgtattgatttctgatattcttgcagctgactacgtgtaattgggcagatcagctttgcagtagattatgctgcatcctcgtggcaaaattctgtattcttagtgattgttacaaacccctttattgctgtctgagaaagtgaaagattgtgtatttctattaaaacatttacaatcaaaattctaa

SEQ ID NO: 7773 - protein, 52 aa, Homo sapiens
MFSLSNTCQRFFFQKVLYPYNVLTVLTVEICSFQLLLVKKSKTMSLYRRLLK

SEQ ID NO: 7774 - DNA, 1881 bp, Homo sapiens
gtttatacataaattttcgtcacctttataaacagcgcagacggcgctatggacaaaaaaagaaaaagatccactaaaaagaaagatttagatggcttcttgccagtttgagcctaatctgattcttacagttttaccttcttgaaccaatgtaaaagtttttttaatgttaaatgattaaattctcagtgaggctatcttccttttccccagtaacattcctgaatttactgttatcttattgtagtacttgcatgacatggattcctgatatctgatgagaggttcattcttgtgtattcagttaatgacaccaaaaggctcagcccaccccaaccctatctcatgttcagtctgtctaatacatgccagagatttttttttcaaaaagtgctttatccctacaatgtactgacagttcttacagttgagatttgttcttttcagctattgcttgtgaaaaaaagcaagactatgtcactctatagaaggctgttaaagtgactcaggcaggaattaattattctgtacctaaggggttacttgtttaatgggatggcattgactttttgaaaatcaagtggactgagtcattgataaaacatttctaagagtggggctagagaacatactttacatctgacatcctttggcctaacaacatctattattatagtgctcagcagtgtgggcattgaagaggcgcagaatgctttgaaagaaactaatcagaatcttggaacatcatgatcatgccattcttaagtaaatcaactattttcaacactgaagaaaaatgaaacattatttagaaaacaatgagattacaagttccaaactcagccagaagctgagatgggaggatcctgagctcaggaggtcaaggctgcagtgagccgagattgtgccactgcactgcagctggggtgacagtgcaagaccctgtctcaaaccaaaccaaaccacacacacacaaacacacatacacacacacacacacgaggtccaaatggtagcagggatccaaagggaacacagtatgtaggtcaaactggcagtaacagtgtacagcctttgacaaactagaaatattagagtaggccaaacacacctccaaactgtaaggctgtgcacaaacataaaaaatggcagccttccatctcctgcactggctgagtccatttacttgtgtacttgttctagtgagtggtgggactgtacatttttgaatagacctcaaaaatacttcattctgctgctgttcagttggctttttaaacctgtctgcagtaggacactgaaaacagcaagaacttcggggtgaacacccgctgatcctttaacaaggatttctggcaggaaactcacaaaaaggagaactgaaaatttagacatacagttggccattgtaaaaaacatcagtttcctctcatacattccaagtaaaccaagtaaaataagtgttggagtaacacttgcataaaagaatttaaggagtgatagctctttctgttctgccattcccaacattcctgggggaaaggagactcaatgagttaatactatttcactgagcccaagatggaaacttggtttgacctaaaacatctgattaatataggctagctgatttcttaaaaattcgttgcattgaaggatattttgcatgtctgtaacacctgtcaatacttgtttgtattgatttctgatattcttgcagctgactacgtgtaattgggcagatcagctttgcagtagattatgctgcatcctcgtggcaaaattctgtattcttagtgattgttacaaacccctttattgctgtctgagaaagtgaaagattgtgtatttctattaaaacatttacaatcaaaattctaa

SEQ ID NO: 7775 - protein, 32 aa, Homo sapiens
MKHYLENNEITSSKLSQKLRWEDPELRRSRLQ

SEQ ID NO: 7776 - DNA, 1805 bp, Homo sapiens
gtttatacataaattttcgtcacctttataaacagcgcagacggcgctatggacaaaaaaagaaaaagatccactaaaaagaaagatttagatggcttcttgccagtttgagcctaatctgattcttacagttttaccttcttgaaccaatgtaaaagtttttttaatgttaaatgattaaattctcagtgaggctatcttccttttccccagtaacattcctgaatttactgttatcttattgtagtacttgcatgacatggattcctgatatctgatgagaggttcattcttgtgtattcagttaatgacaccaaaaggctcagcccaccccaaccctatctcatgttcagtctgtctaatacatgccagagatttttttttcaaaaagtgctttatccctacaatgtactgacagttcttacagttgagatttgttcttttcagctattgcttgtgaaaaaaagcaagactatgtcactctatagaaggctgttaaagtgactcaggcaggaattaattattctgtacctaaggggttacttgtttaatgggatggcattgactttttgaaaatcaagtggactgagtcattgataaaacatttctaagagtggggctagagaacatactttacatctgacatcctttggcctaacaacatctattattatagtgctcagcagtgtgggcattgaagaggcgcagaatgctttgaaagaaactaatcagaatcttggaacatcatgatcatgccattcttaagtaaatcaactattttcaacactgaagaaaaatgaaacattatttagaaaacaatgagattacaagttccaaactcagccaggaatgtggctcacacctgtaatcccagcactttgggacacctaggtgggagcatcgcttgaagccaggagttcaagaccagcttgggcaacgtagtgagacccctatctctacaaaaaataaaaaaattagctgggtgtgatggcacacacctgttgtcccagctactcaagaagctgagatgggaggatcctgagctcaggaggtcaaggctgcagtgagccgagattgtgccactgcactgcagctggggtgacagtgcaagaccctgtttgttctagtgagtggtgggactgtacatttttgaatagacctcaaaaatacttcattctgctgctgttcagttggctttttaaacctgtctgcagtaggacactgaaaacagcaagaacttcggggtgaacacccgctgatcctttaacaaggatttctggcaggaaactcacaaaaaggagaactgaaaatttagacatacagttggccattgtaaaaaacatcagtttcctctcatacattccaagtaaaccaagtaaaataagtgttggagtaacacttgcataaaagaatttaaggagtgatagctctttctgttctgccattcccaacattcctgggggaaaggagactcaatgagttaatactatttcactgagcccaagatggaaacttggtttgacctaaaacatctgattaatataggctagctgatttcttaaaaattcgttgcattgaaggatattttgcatgtctgtaacacctgtcaatacttgtttgtattgatttctgatattcttgcagctgactacgtgtaattgggcagatcagctttgcagtagattatgctgcatcctcgtggcaaaattctgtattcttagtgattgttacaaacccctttattgctgtctgagaaagtgaaagattgtgtatttctattaaaacatttacaatcaaaattctaa

SEQ ID NO: 7777 - protein, 52 aa, Homo sapiens; identical to SEQ ID NO: 7773

SEQ ID NO: 7778 - DNA, 1066 bp, Homo sapiens
catctctttaaacatttagatccattcttttatattatttcccttttttaccacagaattctaatgttggatttttttttttacccttaatagacagatgtacagaagattttaagaaatgcaaggaaactacctgaaaaaacacagacattctataaggagctgaaccgtttgcgaaaggccgctctagcctttggtttcctggacctgctgaaaggggtggctgacatgctggaaagggaatgcacactgctgcctgagacagcccaccctgatgctgcattccagctgacccatgctgcccagcagctcaagctggccagtaccggcacctctgagtatgccgcttatgaccagaacatcacacctttgcacacggacttctctgggagcagcactgaaagaatttgaaactgacttttggagctttccttcttttttcatttcaactgaaaatgctttaggtaaaaacctttccagtatgttcacctctagaatagccacccaaagaccttcctgaggctgcctcagaagcaccacttgctgttttgaatgactctactagtatgagaaggatgtgaaggtggttggctggttgggctttaacttcctgggattcataatttttaagcttggaagatagctgctgttcccatgatgggcacatttcctgagaagcttgaatgactgatgagcatagagcacccctgccttcctcaggaaacctgaccggcaggggctctctggcttcctgaaagcttcacctcttccctcgtttatatctcaactgtaagggcattttcaagcttctgttcatggaatgagcaactcagactgtctggagcttgctgagtacaaacacaccaccactaagtttcagaactttccttagaacttgggcaaaatgtggtggtaactcttaagtgcttttggtatctcttgagattctaacttttaaagagcaaccattaatgtgtaaaatgattcctattattcaaggtttttttttaatgaaaataaaatatttgattttctagaaaatggtttcactatgaaactaaaggtc

SEQ ID NO: 7779 - protein, 74 aa, Homo sapiens
MLPSSSSWPVPAPLSMPLMTRTSHLCTRTSLGAALKEFETDFWSFPSFFISTENALGKNLSSMFTSRIATQRPS

SEQ ID NO: 7780 - DNA, 2576 bp, Homo sapiens
gtgagtggggaggccgagggcccgggactgcctttcgctgcttgttggggttacaggtgaaggggttatgggtgaagaacaacccagggccagcgcttggccttcccgccaccgtggcggccgccccgcgctgtctgtgaggcgccagttccggggcgctgctcccggcctcccctcgctctgaggctcggggtccccagctccgcgtaaactgcacgatttcgccctctgctcagctcccctctgccccctctttccaagagagacttccagatcccacattttcttgactgatttttaagcatttcttcgtttatagctgtctgtttgcattctgattgggaacactgggatcattttcatcatgccgacagtggtggtaatggatgtatccctttccatgacccgacctgtgtctattgaggggtccgaggaataccagcgtaagcacctagcagcccatggtttaacgatgctgtttgagcacatggccacaaattacaagcttgaatttacagcacttgtggttttttcatcactttgggagttgatggtccccttcacgagagattataataccctacaggaagcactaagtaatatggatgattatgacaaaacctgcttggagtctgcattagttggtgtttgcaatatcgttcagcaagaatggggtggtgcaattccttgccaggttgtcctggtgacagacggctgtcttggcattggtagagggtcactgcgacattccctagccactcaaaatcaacgaagtgagagcaacaggtttccactaccttttcctttcccatctaagttatatatcatgtgcatggcgaatttggaggagctccagagcaccgattccttggaatgccttgaacgtctcatagatttaaacaatggtgaagggcagatttttactattgatggccccctgtgcttgaagaatgtacagtctatgtttggaaaactgatagatttggcatatacgcctttccatgctgttctcaagtgtggccacctaactgctgatgtacaagtcttccccaggccagaaccttttgttgtagatgaagaaattgatcctatccctaaagtcattaacacagatttggaaatagtgggatttattgatatagctgatatttcaagtcccccagttctgtccagacatctggtcttacctatagcacttaacaaagaaggtgatgaggtgggtactggcatcactgatgacaatgaagatgaaaattcagccaatcagattgcaggcaaaatacccaacttttgtgtcctgctccatggtagcctaaaagtggaaggaatggtagcgattgttcaattaggtcctgaatggcatggaatgctctactcccaagctgacagcaagaagaaatcaaacctcatgatgtctctctttgagcctggcccagaacctctcccatggctagggaaaatggcacagttgggtcctatttcagatgctaaagaaaacccttatggcgaggatgacaataagagtccattccccctgcagcccaaaaacaaacgcagttatgcccagaatgtgactgtctggatcaaacccagcggcctgcagacagatgtacagaagattttaagaaatgcaaggaaactacctgaaaaaacacagacattctataaggagctgaaccgtttgcgaaaggccgctctagcctttggtttcctggacctgctgaaaggggtggctgacatgctggaaagggaatgcacactgctgcctgagacagcccaccctgatgctgcattccagctgacccatgctgcccagcagctcaagctggccagtaccggcacctctgagtatgccgcttatgaccagaacatcacacctttgcacacggacttctctgggagcagcactgaaagaatttgaaactgacttttggagctttccttcttttttcatttcaactgaaaatgctttaggtaaaaacctttccagtatgttcacctctagaatagccacccaaagaccttcctgaggctgcctcagaagcaccacttgctgttttgaatgactctactagtatgagaaggatgtgaaggtggttggctggttgggctttaacttcctgggattcataatttttaagcttggaagatagctgctgttcccatgatgggcacatttcctgagaagcttgaatgactgatgagcatagagcacccctgccttcctcaggaaacctgaccggcaggggctctctggcttcctgaaagcttcacctcttccctcgtttatatctcaactgtaagggcattttcaagcttctgttcatggaatgagcaactcagactgtctggagcttgctgagtacaaacacaccaccactaagtttcagaactttccttagaacttgggcaaaatgtggtggtaactcttaagtgcttttggtatctcttgagattctaacttttaaagagcaaccattaatgtgtaaaatgattcctattattcaaggtttttttttaatgaaaataaaatatttgattttctagaaaatggtttcactatgaaactaaaggtc

SEQ ID NO: 7781 - protein, 518 aa, Homo sapiens
MPTVVVMDVSLSMTRPVSIEGSEEYQRKHLAAHGLTMLFEHMATNYKLEFTALVVFSSLWELMVPFTRDYNTLQEALSNMDDYDKTCLESALVGVCNIVQQEWGGAIPCQVVLVTDGCLGIGRGSLRHSLATQNQRSESNRFPLPFPFPSKLYIMCMANLEELQSTDSLECLERLIDLNNGEGQIFTIDGPLCLKNVQSMFGKLIDLAYTPFHAVLKCGHLTADVQVFPRPEPFVVDEEIDPIPKVINTDLEIVGFIDIADISSPPVLSRHLVLPIALNKEGDEVGTGITDDNEDENSANQIAGKIPNFCVLLHGSLKVEGMVAIVQLGPEWHGMLYSQADSKKKSNLMMSLFEPGPEPLPWLGKMAQLGPISDAKENPYGEDDNKSPFPLQPKNKRSYAQNVTVWIKPSGLQTDVQKILRNARKLPEKTQTFYKELNRLRKAALAFGFLDLLKGVADMLERECTLLPETAHPDAAFQLTHAAQQLKLASTGTSEYAAYDQNITPLHTDFSGSSTERI

SEQ ID NO: 7782 - DNA, 2377 bp, Homo sapiens
cttctgtcgcgcggccttatagttccggctgtggcgcgcggacggaaagtttatgccgacggaaagtttatgccgacggactgtgtccggcgatgggcacgggcatttcttcgtttatagctgtctgtttgcattctgattgggaacactgggatcattttcatcatgccgacagtggtggtaatggatgtatccctttccatgacccgacctgtgtctattgaggggtccgaggaataccagcgtaagcacctagcagcccatggtttaacgatgctgtttgagcacatggccacaaattacaagcttgaatttacagcacttgtggttttttcatcactttgggagttgatggtccccttcacgagagattataataccctacaggaagcactaagtaatatggatgattatgacaaaacctgcttggagtctgcattagttggtgtttgcaatatcgttcagcaagaatggggtggtgcaattccttgccaggttgtcctggtgacagacggctgtcttggcattggtagagggtcactgcgacattccctagccactcaaaatcaacgaagtgagagcaacaggtttccactaccttttcctttcccatctaagttatatatcatgtgcatggcgaatttggaggagctccagagcaccgattccttggaatgccttgaacgtctcatagatttaaacaatggtgaagggcagatttttactattgatggccccctgtgcttgaagaatgtacagtctatgtttggaaaactgatagatttggcatatacgcctttccatgctgttctcaagtgtggccacctaactgctgatgtacaagtcttccccaggccagaaccttttgttgtagatgaagaaattgatcctatccctaaagtcattaacacagatttggaaatagtgggatttattgatatagctgatatttcaagtcccccagttctgtccagacatctggtcttacctatagcacttaacaaagaaggtgatgaggtgggtactggcatcactgatgacaatgaagatgaaaattcagccaatcagattgcaggcaaaatacccaacttttgtgtcctgctccatggtagcctaaaagtggaaggaatggtagcgattgttcaattaggtcctgaatggcatggaatgctctactcccaagctgacagcaagaagaaatcaaacctcatgatgtctctctttgagcctggcccagaacctctcccatggctagggaaaatggcacagttgggtcctatttcagatgctaaagaaaacccttatggcgaggatgacaataagagtccattccccctgcagcccaaaaacaaacgcagttatgcccagaatgtgactgtctggatcaaacccagcggcctgcagacagatgtacagaagattttaagaaatgcaaggaaactacctgaaaaaacacagacattctataaggagctgaaccgtttgcgaaaggccgctctagcctttggtttcctggacctgctgaaaggggtggctgacatgctggaaagggaatgcacactgctgcctgagacagcccaccctgatgctgcattccagctgacccatgctgcccagcagctcaagctggccagtaccggcacctctgagtatgccgcttatgaccagaacatcacacctttgcacacggacttctctgggagcagcactgaaagaatttgaaactgacttttggagctttccttcttttttcatttcaactgaaaatgctttaggtaaaaacctttccagtatgttcacctctagaatagccacccaaagaccttcctgaggctgcctcagaagcaccacttgctgttttgaatgactctactagtatgagaaggatgtgaaggtggttggctggttgggctttaacttcctgggattcataatttttaagcttggaagatagctgctgttcccatgatgggcacatttcctgagaagcttgaatgactgatgagcatagagcacccctgccttcctcaggaaacctgaccggcaggggctctctggcttcctgaaagcttcacctcttccctcgtttatatctcaactgtaagggcattttcaagcttctgttcatggaatgagcaactcagactgtctggagcttgctgagtacaaacacaccaccactaagtttcagaactttccttagaacttgggcaaaatgtggtggtaactcttaagtgcttttggtatctcttgagattctaacttttaaagagcaaccattaatgtgtaaaatgattcctattattcaaggtttttttttaatgaaaataaaatatttgattttctagaaaatggtttcactatgaaactaaaggtc

SEQ ID NO: 7783 - protein, 518 aa, Homo sapiens; identical to SEQ ID NO: 7781

SEQ ID NO: 7784 - DNA, 1392 bp, Homo sapiens
gggcggtccttggagagcttcagggtcgcccgggcagggttctggctcatcccggagggacgctagggggcgcggcctctcttcgcgatggccaatccgcggccacccctctcctcccacaaatccccaacttctctcgagccttggctgggtttcctgccgtgtctctctgcattgccctgaatctctccccattctcgggctctttccttccccttctgccccactgacccatgggcctcacctggcccggtgactctgtgtccgcttcacacttttgtcccctcactcccctgggccccgtcggtgcacgagcccaacccttcctgctattttcctcgtcactctttagccccctctctcgtatcctctgaaccggttgacagaatcctcttcctgttctttttaaacgcgcctggcctataccagtattttctagtttaaaggaggactacattaactcttattgttgtgtttctgaaaagtgaaatttaaaaagcagcctgaaaaataaaaatttataatttgcccttgaattggaaggaatggagattagggaaggaaaactactctagaggccatttaaaagtatgtatttattagaacatgcaaattcatgttgtctccatcagtggtcaccttgagggattagacattctaatggaatgtcctggctccaccctccagcatgttctcacccaacaatgacagttgagtggagtgggaagggaagtcattctaaagagtccaaagtcagtagcgccacatctggtttataaagtaagagatccagtgggacaatgctatttttgtatgccaacctagataggattataaagcaagactgatttcttctgtggtttatgaatggatcttaaggtaattacaaaagggaaattccaagaatgcataacacaatgacaacatggtgagaaaagtgcagtactacttccaaggtagctagtgtaaaggacacttgagtttttaaaactgtggttaaatgttttatgtggaatttgatgagtttgtatattaaataccactgcttgctgcttttactagaatcaagttaagggacacgttagaaatagaacagcttaatatcactggcttcagagcaaaatgagctcgggtgactgcagattatgatggtaaatatggctttaattacaaacatgaggaatgattcactgaagatgaaaagataggacggatgtgatatgaaaaaaacccaaacattttggcattgaatgatggctaaggtgttccaagtattccatcttttaagatgaattgcttaattaattgcctcgctaccccaggattctcattctttggaaataatttttattaaatttcaataaactgtgaatcccaatggtattttacttt

SEQ ID NO: 7785 - protein, 46 aa, Homo sapiens
MGLTWPGDSVSASHFCPLTPLGPVGARAQPFLLFSSSLFSPLSRIL

SEQ ID NO: 7786 - DNA, 1779 bp, Homo sapiens
ggtccttggagagcttcagggtcgcccgggcagggttctggctcatcccggagggacgctagggggcgcggcctctcttcgcgatggccaatccgcggccacccctctcctcccacaaatccccaacttctctcgagccttggctgggtttcctgccgtgtctctctgcattgccctgaatctctccccattctcgggctctttccttccccttctgccccactgacccatgggcctcacctggcccggtgactctgtgtccgcttcacacttttgtcccctcactcccctgggccccgtcggtgcacgagcccaacccttcctgctattttcctcgtcactctttagccccctctctcgtatcctctgaaccggttgacagaatcctcttcctgttctttttaaacgcgcctggcctataccagtattttctagtttaaaggaggactacattaactcttattgttgtgtttctgaaaagtgaaatttaaaaagcagcctgaaaaataaaaatttataatttgcccttgaattggaaggaatggagattagggaaggaaaactactctagaggccatttaaaagtatgtatttattagaacatgcaaattcatgttgtctccatcagtggtcaccttgagggattagacattctaatggaatgtcctggctccaccctccagcatgttctcacccaacaatgacagttgagtggagtgggaagggaagtcattctaaagagtccaaagtcagtagcgccacatctggtttataaagtaagagatccagtgggacaatgctatttttgtatgccaacctagataggattataaagcaagactgatttcttctgtggtttatgaatggatcttaaggtaattacaaaagggaaattccaagaatgcataacacaatgacaacatggtgagaaaagtgcagtactacttccaaggtagctagtgtaaaggacacttgagtttttaaaactgtggttaaatgttttatgtggaatttgatgagtttgtatattaaataccactgcttgctgcttttactagaatcaagttaagggacacgttagaaatagaacagcttaatatcactggcttcagagcaaaatgagctcgggtgactgcagattatgatggtaaatatggctttaattacaaacatgaggaatgattcactgaagatgaaaagataggacggatgtgatatgaaaaaaacccaaacattttggcattgaatgatggctaaggtgttccaagtattccatcttttaagatgaattgcttaattaattgcctcgctaccccaggattctcattctttggaaataatttttattaaatttcaataaactgtgaatcccaatggtattttactttacaacatggatgggctcatccttatctttaggtcatttggtcagaatcctcccgagaagactgatgaagagtatggaatcatgttccaattctatattcttaattatccttattcctgatgctactgcattgctgggtttccatagccaaggcctaagaacaggaggagaaggcaatgcttgtgggagggaggtcccaataccaaaattctgggcactaacctggtgtctgcagcccgttcccgttagcctcggggatgtcacctcacccacagcctgggatctgacgttcttcctcagactggagtaaggagtgatggaccgtaaaatgctgtgtaatgataaaaggctgaaatatccactgaatgattaaaaccaactctaataatctg

SEQ ID NO: 7787 - protein, 107 aa, Homo sapiens [sequence omitted]

SEQ ID NO: 7788 - DNA, 5582 bp, Homo sapiens
gcccgggcagggttctggctcatcccggagggacgctagggggcgcggcctctcttcgcgatggccaatccgcggccacccctctcctcccacaaatccccaacttctctcgagccttggctgggtttcctgccgtgtctctctgcattgccctgaatctctccccattctcgggctctttccttccccttctgccccactgacccatgggcctcacctggcccggtgactctgtgtccgcttcacacttttgtcccctcactcccctgggccccgtcggtgcacgagcccaacccttcctgctattttcctcgtcactctttagccccctctctcgtatcctctgaaccggttgacagaatcctcttcctgttctttttaaactgcaattcctgaactacaaatcctggccgggcgtggtggttcaggcctgtaatcccagcactttgggaggccaaggtgggcggatcgcttcaggtcaggagtttgagaccagcctgggaaacatggtgaaaccccgctctctactaaaatacaaaaattagccgggcatggtaacgagtgcctgtaatcccagctacttgggaggctaacgcacgagaatcttggggggaaaaaccccaaaactgtaattcctggctgaggtatgctttgtatatccttcttagctgacctgagcccaatttacctcaagacttggcctcttggtctcctcagcccaaatgctcactttatttcccctatcccctctttgagggaagcagagggccctcgttcctctcaccctggacaaggcatgcgtgctcagatttccctgtaaggcaacatgggctcttgcctgccactctggccacctggtgtctccattgtagtctgtgcctcagtgaggtccttaagagggcaagaggtgactttctttctaaccatgtagggagccagggaatcccagctagagataggcttagatggatgccagcaggcccctgggtagttacggttcaaagaacaatgtggaaccacataggttacaaagtgagtacagaaaggcctctagaaggcctcaggcatttgcctttttcttttagctgataggatggggcgagattaggagatgggacgaggaaggaggatgctttgaactgaacagacaaatctgtctgacttctcacagcttgttatgtgggagattgtggggccagttgcttgtagttttttcctgtccctgggaatatccctgccagcactggggccagggccctgcagactgccctatttgcttcaaaacttctttccccaacctggctgatctcaccatgtcaagacctagttatgcttgagcaggcattgggctccaggcctctggccgctccagaagggcacttgactgtaaggatgaaatcctgtctctgagctgcactcagtgtgaagtgccaccacctgcatccccctgtctcagggttgtggataccccctggctgggcttcatggagaaatcttctctgatcaccaacctgaatcccagagtagcctccatcttaggacagaatgagaggccttctgtaaccagatataactggccagcatggggaaattgatcaggatggggccgcaagagaggtggttactccggacaaagcggcttcattggagtcgcctcctcttcttactgggaatgttgatcatcggttctacttatcagcaccttaggagaccccggggcctttcctcattgtgggcagcagtctcttctcatcagcctataaaactggccagtcgggacctctccagtgaagagatgatgatgatgagcagcagcccttcaaaacctagctccgaaatggggggtaagatgctggtaccccaagcctcagtgggcagtgatgaagcaacactgagcatgacagtggagaatatccccagtatgcctaaaagaacagccaagatgatcccaacaacaaccaagaataattacagcccaacagcagcaggtacagaaagaaggaaggaagacaccccaacatccagtagaacactgacttactacacctcaacttcaagcagacaaatagtaaaaaagtataccccaacacccaggggagaaatgaagagctacagcccaactcaagtgagggaaaaggtgaagtatactccttccccacgtggtagaagagtaggcacttacgtgccgtccacattcatgacaatggaaacaagccatgcgatcacccccaggacaacagtgaaagacagtgacattacagcaacctataaaatactcgaaaccaactctcttaagagaataatggaggaaaccaccccaaccactctcaagggaatgtttgatagcaccccaacttttctgacacatgaggtagaagcaaacgtcttgacttctccaaggagcgtcatggaaaaaaacaacctgtttccccccagaagagtggaaagtaacagctcagcccatccctgggggttagtgggaaagagcaacccgaagactccccagggaacagtcctgttgcataccccagccacctctgaggggcaggtgacaataagcaccatgacaggcagcagcccagcagaaaccaaagccttcactgctgcctggagtcttaggaatccttcacccaggaccagtgtatcagccatcaaaacagccccagccatagtctggaggctggcaaagaaaccttccacagcacccagcacctcaacaacccctacggtcagggcaaagctgaccatgcaggtccatcactgtgtggttgtgaagccaacccccagccatgctcaccactccctccccaagcctcacaacagccctgctcccagaggagctcagtcctagtccctcagtgctgcctcccagcttgccagacctccaccccaagggagagtaccccccagatctgttcagtgtggaggagcggcggcagggctgggtggtcctgcacgtttttggcatgatgtatgtgtttgtggccttggccattgtttgcgacgagtacttcgttccagccctgggtgtcatcacagacaagctgcagatctccgaggatgtggcaggcgccacattcatggctgctggaggctctgctcctgagctcttcacctccctcatcggtgtcttcatttcccacagcaacgtgggcattggtaccattgtgggctctgctgtgttcaacattctctttgtcattggcacttgttccctcttctcccgagagatcctcaacctcacctggtggcccttattccgtgatgtctccttctacatccttgacctgataatgctcatcctcttcttcctggacagcctcattgcctggtgggagagcctgctgctgctgctggcctatgccttctatgtgttcaccatgaagtggaacaagcatatcgaggtctgggtgaaggagcagctcagcaggaggccagtggccaaggtcatggccttagaagacctcagcaagctcccgtccttgctgacccgagggagcagctcgacctctctgcacaacagcaccatccgcagcaccatctaccagctcatgctccacagcctggaccccctgagggaagttcgccttgccaaggagaaggaggaggagagcttgaatcaaggggccagagcccaaccccaggccaaagcagaaagcaaaccagaagaggaggagccagccaagctccctgcggtcacggtcacaccagcccctgttccagacatcaagggagatcagaaggagaatccaggcggtcaggaagatgtggctgaggccgagagcacaggtgaaatgccaggcgaagagggcgaaactgctggtgaaggtgaaactgaagagaaaagtggaggtgaaactcaaccagaaggtgaaggtgaaactgaaacacaaggaaaaggagaagaatgtgaagatgaaaatgaagcagaaggaaaaggagacaatgaaggtgaagatgagggtgaaatccacgcagaagatggtgaaatgaaaggtaatgaaggtgaaactgaaagccaggaactcagtgctgaaaatcacggtgaagccaaaaatgatgagaaaggtgtagaagatggagggggaagtgatggaggggatagcgaagaggaggaagaggaggaggaagagcaggaggaagaggaggaggaggaagagcaggaggaagaggaggaggaggaggaggaagaggaggagaagggaaatgaagagcctctgtccctggactggcctgaaaccaggcagaagcaggccatttacctcttccttctgcccatcgtgttcccactgtggctgacagtccccgacgtccgaaggcaggagtctaggaagttttttgttttcaccttcctgggatctatcatgtggatagccatgttctcatacctcatggtgtggtgggctcaccaggtgagtgaacagcaggaacgaaatcctctaccagcaggtcccaacgacactttccttcaggatcaatctccggtactcagggaatctcgaggatcaagtgaattcgtgcagtttctatgttgtttgtaaaggcttaaaagtagactttttattccagtgaacgcagtgcttctcaagtgtggcttttctgtcatatcctgtagcatggcatagaaggccttggaatcctgcctgattccagctgaacttggcttattagccttatttcctgctttctctgccatgtacccatccctctcacctggtgaaatcctacgcattctgagagccagcttttttcgcctgctctctggcattcaattagtcttcctctgagtacctatagtgtttctgttctgcctggaatactgaactgtaataattgtttactagctttcctctctaaaaggccgagattagggtctatgtcatcctgctcatacttcacctccagcctcttagttcctggcacacagcaagtgtccacattcctggaaatagaaatgctgacatgaacagctctttggaagggcagttcttgtggggaggtaggggtgttaagagttggaatgacagtgagcagcagatctggtgtaggtaacttttagtccaattgtgaaaagaagagcaacatggtccctgtggccaggagcaggagtcttgcttgctcttcctctctgtggccatctcagctgtcggtccccctatcacccttcctcactcaggctgagggggtgtggctgagctccttagaaggcagtctgtttgcacaaagtaggatgtggatagtgcttggatgtgcctcaggtttttcacctactgttgaccgttgccgtttaccaggttggtgaaacaatagggatttctgaagagatcatgggcctgacaatccttgcagcaggcacatcaattcctgacctcatcaccagtgtgattgtcgctcgaaaaggcctgggagacatggctgtgtcaagctctgtgggcagtaacatatttgatatcactgtggggtgagtggcaatgtaactttctaaggggtgttaagtatgactggaaaacactgcattggctctgttcactggttttctgctttattcattatacatagaataaaagggcatttatattgtt

SEQ ID NO: 7789 - protein, 583 aa, Homo sapiens
MLTTPSPSLTTALLPEELSPSPSVLPPSLPDLHPKGEYPPDLFSVEERRQGWVVLHVFGMMYVFVALAIVCDEYFVPALGVITDKLQISEDVAGATFMAAGGSAPELFTSLIGVFISHSNVGIGTIVGSAVFNILFVIGTCSLFSREILNLTWWPLFRDVSFYILDLIMLILFFLDSLIAWWESLLLLLAYAFYVFTMKWNKHIEVWVKEQLSRRPVAKVMALEDLSKLPSLLTRGSSSTSLHNSTIRSTIYQLMLHSLDPLREVRLAKEKEEESLNQGARAQPQAKAESKPEEEEPAKLPAVTVTPAPVPDIKGDQKENPGGQEDVAEAESTGEMPGEEGETAGEGETEEKSGGETQPEGEGETETQGKGEECEDENEAEGKGDNEGEDEGEIHAEDGEMKGNEGETESQELSAENHGEAKNDEKGVEDGGGSDGGDSEEEEEEEEEQEEEEEEEEQEEEEEEEEEEEEKGNEEPLSLDWPETRQKQAIYLFLLPIVFPLWLTVPDVRRQESRKFFVFTFLGSIMWIAMFSYLMVWWAHQVSEQQERNPLPAGPNDTFLQDQSPVLRESRGSSEFVQFLCCL

SEQ ID NO: 7790 - DNA, 711 bp, Homo sapiens
gagatacagatgggcacactcacctgccttcggacgtcggggactgtcagccacagtgggaacacgatgggcagaaggaagagagatggtctcgctctgtcaccaggctggagtgcagtggcacgatcttggcttactgcaatctctgcctcccaggttcaagcgattctcctgcctcagcctcccaagtagctgggactacaggcctaaaggaaatccttggtgtagagggcactaatggatctccccagagcaggctgggacatcccaagatacctgaggagttggtgccctgagccccccgcgcctccagcccatgacttggagctgatcaaagtgggagtaggagtacctgggtgcatgatgctttgggttactttcatctgaaatagcagttaatcctcacagcctcacctctaccctgcttcaccttgagtggcctggaacagtaagaaggtcacgagctccctctgctgaagcccacagaagggcccacccactgtggaagagctggcttcatctctgagtatgctggggtcactctggatgttggaagcctgggatcaggacctgaggtctgctagttacatgtccttgcctttatgctgctgtgggcagaacaaaatctagttctttcccttttcatgccactatgtaacacagtctcaatctggcccagaaagatgaaaaaaggaatataattcacaaagt

SEQ ID NO: 7791 - protein, 60 aa, Homo sapiens
MGTLTCLRTSGTVSHSGNTMGRRKRDGLALSPGWSAVARSWLTAISASQVQAILLPQPPK

SEQ ID NO: 7792 - DNA, 5377 bp, Homo sapiens
cccttcacacccgaccctgccttgaattaggattccataggagagctgggggcaggagaatggggtgttccctgctgtccagcttcagacccactctttgagatattggattctgacaagtttccagagctgagaagacagccagatgtcaaggtctgaagggttgtggataccccctggctgggcttcatggagaaatcttctctgatcaccaacctgaatcccagagtagcctccatcttaggacagaatgagaggccttctgtaaccagatataactggccagcatggggaaattgatcaggatggggccgcaagagaggtggttactccggacaaagcggcttcattggagtcgcctcctcttcttactgggaatgttgatcatcggttctacttatcagcaccttaggagaccccggggcctttcctcattgtgggcagcagtctcttctcatcagcctataaaactggccagtcgggacctctccagtgaagagatgatgatgatgagcagcagcccttcaaaacctagctccgaaatggggggtaagatgctggtaccccaagcctcagtgggcagtgatgaagcaacactgagcatgacagtggagaatatccccagtatgcctaaaagaacagccaagatgatcccaacaacaaccaagaataattacagcccaacagcagcaggtacagaaagaaggaaggaagacaccccaacatccagtagaacactgacttactacacctcaacttcaagcagacaaatagtaaaaaagtataccccaacacccaggggagaaatgaagagctacagcccaactcaagtgagggaaaaggtgaagtatactccttccccacgtggtagaagagtaggcacttacgtgccgtccacattcatgacaatggaaacaagccatgcgatcacccccaggacaacagtgaaagacagtgacattacagcaacctataaaatactcgaaaccaactctcttaagagaataatggaggaaaccaccccaaccactctcaagggaatgtttgatagcaccccaacttttctgacacatgaggtagaagcaaacgtcttgacttctccaaggagcgtcatggaaaaaaacaacctgtttccccccagaagagtggaaagtaacagctcagcccatccctgggggttagtgggaaagagcaacccgaagactccccagggaacagtcctgttgcataccccagccacctctgaggggcaggtgacaataagcaccatgacaggcagcagcccagcagaaaccaaagccttcactgctgcctggagtcttaggaatccttcacccaggaccagtgtatcagccatcaaaacagccccagccatagtctggaggctggcaaagaaaccttccacagcacccagcacctcaacaacccctacggtcagggcaaagctgaccatgcaggtccatcactgtgtggttgtgaagccaacccccagccatgctcaccactccctccccaagcctcacaacagccctgctcccagaggagctcagtcctagtccctcagtgctgcctcccagcttgccagacctccaccccaagggagagtaccccccagatctgttcagtgtggaggagcggcggcagggctgggtggtcctgcacgtttttggcatgatgtatgtgtttgtggccttggccattgtttgcgacgagtacttcgttccagccctgggtgtcatcacagacaagctgcagatctccgaggatgtggcaggcgccacattcatggctgctggaggctctgctcctgagctcttcacctccctcatcggtgtcttcatttcccacagcaacgtgggcattggtaccattgtgggctctgctgtgttcaacattctctttgtcattggcacttgttccctcttctcccgagagatcctcaacctcacctggtggcccttattccgtgatgtctccttctacatccttgacctgataatgctcatcctcttcttcctggacagcctcattgcctggtgggagagcctgctgctgctgctggcctatgccttctatgtgttcaccatgaagtggaacaagcatatcgaggtctgggtgaaggagcagctcagcaggaggccagtggccaaggtcatggccttagaagacctcagcaagccgggcgatggggccattgcggtggatgagctacaggataacaagaagctgaagctcccgtccttgctgacccgagggagcagctcgacctctctgcacaacagcaccatccgcagcaccatctaccagctcatgctccacagcctggaccccctgagggaagttcgccttgccaaggagaaggaggaggagagcttgaatcaaggggccagagcccaaccccaggccaaagcagaaagcaaaccagaagaggaggagccagccaagctccctgcggtcacggtcacaccagcccctgttccagacatcaagggagatcagaaggagaatccaggcggtcaggaagatgtggctgaggccgagagcacaggtgaaatgccaggcgaagagggcgaaactgctggtgaaggtgaaactgaagagaaaagtggaggtgaaactcaaccagaaggtgaaggtgaaactgaaacacaaggaaaaggagaagaatgtgaagatgaaaatgaagcagaaggaaaaggagacaatgaaggtgaagatgagggtgaaatccacgcagaagatggtgaaatgaaaggtaatgaaggtgaaactgaaagccaggaactcagtgctgaaaatcacggtgaagccaaaaatgatgagaaaggtgtagaagatggagggggaagtgatggaggggatagcgaagaggaggaagaggaggaggaagagcaggaggaagaggaggaggaggaagagcaggaggaagaggaggaggaggaggaggaagaggaggagaagggaaatgaagagcctctgtccctggactggcctgaaaccaggcagaagcaggccatttacctcttccttctgcccatcgtgttcccactgtggctgacagtccccgacgtccgaaggcaggagtctaggaagttttttgttttcaccttcctgggatctatcatgtggatagccatgttctcatacctcatggtgtggtgggctcaccaggttggtgaaacaatagggatttctgaagagatcatgggcctgacaatccttgcagcaggcacatcaattcctgacctcatcaccagtgtgattgtcgctcgaaaaggcctgggagacatggctgtgtcaagctctgtgggcagtaacatatttgatatcactgtgggcttgcctgttccttggttgcttttctctcttatcaatggattacagccagttccagtcagcagcaatggcttgttttgtgcaattgttttgctttttctcatgcttctgtttgtgatctcttcaattgcgtcatgtaaatggagaatgaacaagatcctgggcttcacaatgttcctcctttactttgtattcctgataatcagtgtgatgttagaagatcgaatcatatcctgtcctgtatctgtctgaatcagtcactcttgctcacaatgggcatggatcagaagaccatgcagaagttactgtatctcttgtgaccctaatgaaagaatgtatatgatcctggaaagtgaactgggtgacctaggacctctgatatgaatgtgatctgagactaaagtttgtccttggaaacacctgcagctcattgtggattaagaacctcacccctggaggggtggagtttctacccctgactcatgcagacatctattacatggaggcagtagaaggacccctggagccagagggttttctaaatgagataactgggggcaaaggttgggataggcgcagcagctataagacaagctcctacgctcactgttccctgatcattccaaaggctgctggcccaaaagatgcagatgtggtctacatctcagccttcctgacctctgccccaaacacacgctgcaattttgtctcctccttttctgttcaaattgtgaggttctatcaggtttgtaatcactgtagcttcagttattggtgagtctaaggatccaaggctacagaaaaaaaagaaatataacaggaattaatgatcattccacgttttgtagcccactgcatctggatatataccagtattttctttttttttttttttgagacagagtttggctcttgttgcccaggctggtgtgcaatggcgtgatctcggcacaccacaaccttcacctccccggttcaagcaattctcctgcctcagcctgaagtcgtgatctgcccgcctcggcctcccaaagtgctgggattacaggcgtcagccaccgcgcctggcctataccagtattttctagtttaaaggaggactacattaactcttattgttgtgtttctgaaaagtgaaatttaaaaagcagcctgaaaaataaaaatttataatttgcccttgaattggaaggaatggagattagggaaggaaaactactctagaggccatttaaaagtatgtatttattagaacatgcaaattcatgttgtctccatcagtggtcaccttgagggattagacattctaatggaatgtcctggctccaccctccagcatgttctcacccaacaatgacagttgagtggagtgggaagggaagtcattctaaagagtccaaagtcagtagcgccacatctggtttataaagtaagagatccagtgggacaatgctatttttgtatgccaacctagataggattataaagcaagactgatttcttctgtggtttatgaatggatcttaaggtaattacaaaagggaaattccaagaatgcataacacaatgacaacatggtgagaaaagtgcagtactacttccaaggtagctagtgtaaaggacacttgagtttttaaaactgtggttaaatgttttatgtggaatttgatgagtttgtatattaaataccactgcttgctgcttttactagaatcaagttaagggacacgttagaaatagaacagcttaatatcactggcttcagagcaaaatgagctcgggtgactgcagattatgatggtaaatatggctttaattacaaacatgaggaatgattcactgaagatgaaaagataggacggatgtgatatgaaaaaaacccaaacattttggcattgaatgatggctaaggtgttccaagtattccatcttttaagatgaattgcttaattaattgcctcgctaccccaggattctcattctttggaaataatttttattaaatttcaataaactgtgaatcccaatggtattttacttt

SEQ ID NO: 7793 - protein, 697 aa, Homo sapiens
MLTTPSPSLTTALLPEELSPSPSVLPPSLPDLHPKGEYPPDLFSVEERRQGWVVLHVFGMMYVFVALAIVCDEYFVPALGVITDKLQISEDVAGATFMAAGGSAPELFTSLIGVFISHSNVGIGTIVGSAVFNILFVIGTCSLFSREILNLTWWPLFRDVSFYILDLIMLILFFLDSLIAWWESLLLLLAYAFYVFTMKWNKHIEVWVKEQLSRRPVAKVMALEDLSKPGDGAIAVDELQDNKKLKLPSLLTRGSSSTSLHNSTIRSTIYQLMLHSLDPLREVRLAKEKEEESLNQGARAQPQAKAESKPEEEEPAKLPAVTVTPAPVPDIKGDQKENPGGQEDVAEAESTGEMPGEEGETAGEGETEEKSGGETQPEGEGETETQGKGEECEDENEAEGKGDNEGEDEGEIHAEDGEMKGNEGETESQELSAENHGEAKNDEKGVEDGGGSDGGDSEEEEEEEEEQEEEEEEEEQEEEEEEEEEEEEKGNEEPLSLDWPETRQKQAIYLFLLPIVFPLWLTVPDVRRQESRKFFVFTFLGSIMWIAMFSYLMVWWAHQVGETIGISEEIMGLTILAAGTSIPDLITSVIVARKGLGDMAVSSSVGSNIFDITVGLPVPWLLFSLINGLQPVPVSSNGLFCAIVLLFLMLLFVISSIASCKWRMNKILGFTMFLLYFVFLIISVMLEDRIISCPVSV

SEQ ID NO: 7794 - DNA, 5768 bp, Homo sapiens
cccttcacacccgaccctgccttgaattaggattccataggagagctgggggcaggagaatggggtgttccctgctgtccagcttcagacccactctttgagatattggattctgacaagtttccagagctgagaagacagccagatgtcaaggtctgaagggttgtggataccccctggctgggcttcatggagaaatcttctctgatcaccaacctgaatcccagagtagcctccatcttaggacagaatgagaggccttctgtaaccagatataactggccagcatggggaaattgatcaggatggggccgcaagagaggtggttactccggacaaagcggcttcattggagtcgcctcctcttcttactgggaatgttgatcatcggttctacttatcagcaccttaggagaccccggggcctttcctcattgtgggcagcagtctcttctcatcagcctataaaactggccagtcgggacctctccagtgaagagatgatgatgatgagcagcagcccttcaaaacctagctccgaaatggggggtaagatgctggtaccccaagcctcagtgggcagtgatgaagcaacactgagcatgacagtggagaatatccccagtatgcctaaaagaacagccaagatgatcccaacaacaaccaagaataattacagcccaacagcagcaggtacagaaagaaggaaggaagacaccccaacatccagtagaacactgacttactacacctcaacttcaagcagacaaatagtaaaaaagtataccccaacacccaggggagaaatgaagagctacagcccaactcaagtgagggaaaaggtgaagtatactccttccccacgtggtagaagagtaggcacttacgtgccgtccacattcatgacaatggaaacaagccatgcgatcacccccaggacaacagtgaaagacagtgacattacagcaacctataaaatactcgaaaccaactctcttaagagaataatggaggaaaccaccccaaccactctcaagggaatgtttgatagcaccccaacttttctgacacatgaggtagaagcaaacgtcttgacttctccaaggagcgtcatggaaaaaaacaacctgtttccccccagaagagtggaaagtaacagctcagcccatccctgggggttagtgggaaagagcaacccgaagactccccagggaacagtcctgttgcataccccagccacctctgaggggcaggtgacaataagcaccatgacaggcagcagcccagcagaaaccaaagccttcactgctgcctggagtcttaggaatccttcacccaggaccagtgtatcagccatcaaaacagccccagccatagtctggaggctggcaaagaaaccttccacagcacccagcacctcaacaacccctacggtcagggcaaagctgaccatgcaggtccatcactgtgtggttgtgaagccaacccccagccatgctcaccactccctccccaagcctcacaacagccctgctcccagaggagctcagtcctagtccctcagtgctgcctcccagcttgccagacctccaccccaagggagagtaccccccagatctgttcagtgtggaggagcggcggcagggctgggtggtcctgcacgtttttggcatgatgtatgtgtttgtggccttggccattgtttgcgacgagtacttcgttccagccctgggtgtcatcacagacaagctgcagatctccgaggatgtggcaggcgccacattcatggctgctggaggctctgctcctgagctcttcacctccctcatcggtgtcttcatttcccacagcaacgtgggcattggtaccattgtgggctctgctgtgttcaacattctctttgtcattggcacttgttccctcttctcccgagagatcctcaacctcacctggtggcccttattccgtgatgtctccttctacatccttgacctgataatgctcatcctcttcttcctggacagcctcattgcctggtgggagagcctgctgctgctgctggcctatgccttctatgtgttcaccatgaagtggaacaagcatatcgaggtctgggtgaaggagcagctcagcaggaggccagtggccaaggtcatggccttagaagacctcagcaagccgggcgatggggccattgcggtggatgagctacaggataacaagaagctgaagctcccgtccttgctgacccgagggagcagctcgacctctctgcacaacagcaccatccgcagcaccatctaccagctcatgctccacagcctggaccccctgagggaagttcgccttgccaaggagaaggaggaggagagcttgaatcaaggggccagagcccaaccccaggccaaagcagaaagcaaaccagaagaggaggagccagccaagctccctgcggtcacggtcacaccagcccctgttccagacatcaagggagatcagaaggagaatccaggcggtcaggaagatgtggctgaggccgagagcacaggtgaaatgccaggcgaagagggcgaaactgctggtgaaggtgaaactgaagagaaaagtggaggtgaaactcaaccagaaggtgaaggtgaaactgaaacacaaggaaaaggagaagaatgtgaagatgaaaatgaagcagaaggaaaaggagacaatgaaggtgaagatgagggtgaaatccacgcagaagatggtgaaatgaaaggtaatgaaggtgaaactgaaagccaggaactcagtgctgaaaatcacggtgaagccaaaaatgatgagaaaggtgtagaagatggagggggaagtgatggaggggatagcgaagaggaggaagaggaggaggaagagcaggaggaagaggaggaggaggaagagcaggaggaagaggaggaggaggaggaggaagaggaggagaagggaaatgaagagcctctgtccctggactggcctgaaaccaggcagaagcaggccatttacctcttccttctgcccatcgtgttcccactgtggctgacagtccccgacgtccgaaggcaggagtctaggaagttttttgttttcaccttcctgggatctatcatgtggatagccatgttctcatacctcatggtgtggtgggctcaccaggttggtgaaacaatagggatttctgaagagatcatgggcctgacaatccttgcagcaggcacatcaattcctgacctcatcaccagtgtgattgtcgctcgaaaaggcctgggagacatggctgtgtcaagctctgtgggcagtaacatatttgatatcactgtgggcttgcctgttccttggttgcttttctctcttatcaatggattacagccagttccagtcagcagcaatggcttgttttgtgcaattgttttgctttttctcatgcttctgtttgtgatctcttcaattgcgtcatgtaaatggagaatgaacaagatcctgggcttcacaatgttcctcctttactttgtattcctgataatcagtgtgatgttagaagatcgaatcatatcctgtcctgtatctgtctgaatcagtcactcttgctcacaatgggcatggatcagaagaccatgcagaagttactgtatctcttgtgaccctaatgaaagaatgtatatgatcctggaaagtgaactgggtgacctaggacctctgatatgaatgtgatctgagactaaagtttgtccttggaaacacctgcagctcattgtggattaagaacctcacccctggaggggtggagtttctacccctgactcatgcagacatctattacatggaggcagtagaaggacccctggagccagagggttttctaaatgagataactgggggcaaaggttgggataggcgcagcagctataagacaagctcctacgctcactgttccctgatcattccaaaggctgctggcccaaaagatgcagatgtggtctacatctcagccttcctgacctctgccccaaacacacgctgcaattttgtctcctccttttctgttcaaattgtgaggttctatcaggtttgtaatcactgtagcttcagttattggtgagtctaaggatccaaggctacagaaaaaaaagaaatataacaggaattaatgatcattccacgttttgtagcccactgcatctggatatataccagtattttctttttttttttttttgagacagagtttggctcttgttgcccaggctggtgtgcaatggcgtgatctcggcacaccacaaccttcacctccccggttcaagcaattctcctgcctcagcctgaagtcgtgatctgcccgcctcggcctcccaaagtgctgggattacaggcgtcagccaccgcgcctggcctataccagtattttctagtttaaaggaggactacattaactcttattgttgtgtttctgaaaagtgaaatttaaaaagcagcctgaaaaataaaaatttataatttgcccttgaattggaaggaatggagattagggaaggaaaactactctagaggccatttaaaagtatgtatttattagaacatgcaaattcatgttgtctccatcagtggtcaccttgagggattagacattctaatggaatgtcctggctccaccctccagcatgttctcacccaacaatgacagttgagtggagtgggaagggaagtcattctaaagagtccaaagtcagtagcgccacatctggtttataaagtaagagatccagtgggacaatgctatttttgtatgccaacctagataggattataaagcaagactgatttcttctgtggtttatgaatggatcttaaggtaattacaaaagggaaattccaagaatgcataacacaatgacaacatggtgagaaaagtgcagtactacttccaaggtagctagtgtaaaggacacttgagtttttaaaactgtggttaaatgttttatgtggaatttgatgagtttgtatattaaataccactgcttgctgcttttactagaatcaagttaagggacacgttagaaatagaacagcttaatatcactggcttcagagcaaaatgagctcgggtgactgcagattatgatggtaaatatggctttaattacaaacatgaggaatgattcactgaagatgaaaagataggacggatgtgatatgaaaaaaacccaaacattttggcattgaatgatggctaaggtgttccaagtattccatcttttaagatgaattgcttaattaattgcctcgctaccccaggattctcattctttggaaataatttttattaaatttcaataaactgtgaatcccaatggtattttactttacaacatggatgggctcatccttatctttaggtcatttggtcagaatcctcccgagaagactgatgaagagtatggaatcatgttccaattctatattcttaattatccttattcctgatgctactgcattgctgggtttccatagccaaggcctaagaacaggaggagaaggcaatgcttgtgggagggaggtcccaataccaaaattctgggcactaacctggtgtctgcagcccgttcccgttagcctcggggatgtcacctcacccacagcctgggatctgacgttcttcctcagactggagtaaggagtgatggaccgtaaaatgctgtgtaatgataaaaggctgaaatatccactgaatgattaaaaccaactctaataatctg

SEQ ID NO: 7795 - protein, 697 aa, Homo sapiens; identical to SEQ ID NO: 7793

SEQ ID NO: 7796 - DNA, 793 bp, Homo sapiens
gaaagtaagctacaaagataatatagtccaaggatggcaaaaacatctccctgcaattatttctccattccatgtctatcacagacattaccaatcaatcatggtacttttctacaaagtttgggtcagagtccttctcaattcagtacccaagcaggccatcacttgagcttgtaaaggaaataaatcctatttcttggtcctgagtccaaccatgtcattttaccagagaggaaataggccttgagaagggaaatgacttaccctaaggtcacagccagtcagtgacaatgcagagaatgtaagacagaactttgggaattaggcaccacaactaggcctcgtaggatcagaatccagatgtcacaacccccatggcagccttttcccacactctgcagctgccctctggctgctcagctgactgtcctaactgaaagggcgtggcagggatgatcctacaattccaggtaagatgtatgtcctgtctcatttgcagttcgccttgccaaggagaaggaggaggagagcttgaatcaaggggccagagcccaaccccaggccaaagcagaaagcaaaccagaaggaagatgtggctgaggccgagagcacaggtgaaatgccaggcgaagagggcgaaactgctggtgaaggtgaaactgaagagaaaagtggaggtgaaactcaaccagaaggtgaaggtgaaactgaaacacaaggaaaaggagaagaatgtgaagatgaaaatgaagcagaaggaaaaggagacaatgaaggtgaagatgagggtgaa

SEQ ID NO: 7797 - protein, 112 aa, Homo sapiens
MILQFQVRCMSCLICSSPCQGEGGGELESRGQSPTPGQSRKQTRRKMWLRPRAQVKCQAKRAKLLVKVKLKRKVEVKLNQKVKVKLKHKEKEKNVKMKMKQKEKETMKVKMR

SEQ ID NO: 7798 - DNA, 1209 bp, Homo sapiens
ctcgaaaaggcctgggagacatggctgtgtcaagctctgtgggcagtaacatatttgatatcactgtgggagtttggctcttgttgcccaggctggtgtgcaatggcgtgatctcggcacaccacaaccttcacctccccggttcaagcaattctcctgcctcagcctgaagtcgtgatctgcccgcctcggcctcccaaagtgctgggattacaggcgtcagccaccgcgcctggcctataccagtattttctagtttaaaggaggactacattaactcttattgttgtgtttctgaaaagtgaaatttaaaaagcagcctgaaaaataaaaatttataatttgcccttgaattggaaggaatggagattagggaaggaaaactactctagaggccatttaaaagtatgtatttattagaacatgcaaattcatgttgtctccatcagtggtcaccttgagggattagacattctaatggaatgtcctggctccaccctccagcatgttctcacccaacaatgacagttgagtggagtgggaagggaagtcattctaaagagtccaaagtcagtagcgccacatctggtttataaagtaagagatccagtgggacaatgctatttttgtatgccaacctagataggattataaagcaagactgatttcttctgtggtttatgaatggatcttaaggtaattacaaaagggaaattccaagaatgcataacacaatgacaacatggtgagaaaagtgcagtactacttccaaggtagctagtgtaaaggacacttgagtttttaaaactgtggttaaatgttttatgtggaatttgatgagtttgtatattaaataccactgcttgctgcttttactagaatcaagttaagggacacgttagaaatagaacagcttaatatcactggcttcagagcaaaatgagctcgggtgactgcagattatgatggtaaatatggctttaattacaaacatgaggaatgattcactgaagatgaaaagataggacggatgtgatatgaaaaaaacccaaacattttggcattgaatgatggctaaggtgttccaagtattccatcttttaagatgaattgcttaattaattgcctcgctaccccaggattctcattctttggaaataatttttattaaatttcaataaactgtgaatcccaatggtattttacttt

SEQ ID NO: 7799 - protein, 49 aa, Homo sapiens
MAVSSSVGSNIFDITVGVWLLLPRLVCNGVISAHHNLHLPGSSNSPASA

SEQ ID NO: 7800 - DNA, 1600 bp, Homo sapiens
ctcgaaaaggcctgggagacatggctgtgtcaagctctgtgggcagtaacatatttgatatcactgtgggagtttggctcttgttgcccaggctggtgtgcaatggcgtgatctcggcacaccacaaccttcacctccccggttcaagcaattctcctgcctcagcctgaagtcgtgatctgcccgcctcggcctcccaaagtgctgggattacaggcgtcagccaccgcgcctggcctataccagtattttctagtttaaaggaggactacattaactcttattgttgtgtttctgaaaagtgaaatttaaaaagcagcctgaaaaataaaaatttataatttgcccttgaattggaaggaatggagattagggaaggaaaactactctagaggccatttaaaagtatgtatttattagaacatgcaaattcatgttgtctccatcagtggtcaccttgagggattagacattctaatggaatgtcctggctccaccctccagcatgttctcacccaacaatgacagttgagtggagtgggaagggaagtcattctaaagagtccaaagtcagtagcgccacatctggtttataaagtaagagatccagtgggacaatgctatttttgtatgccaacctagataggattataaagcaagactgatttcttctgtggtttatgaatggatcttaaggtaattacaaaagggaaattccaagaatgcataacacaatgacaacatggtgagaaaagtgcagtactacttccaaggtagctagtgtaaaggacacttgagtttttaaaactgtggttaaatgttttatgtggaatttgatgagtttgtatattaaataccactgcttgctgcttttactagaatcaagttaagggacacgttagaaatagaacagcttaatatcactggcttcagagcaaaatgagctcgggtgactgcagattatgatggtaaatatggctttaattacaaacatgaggaatgattcactgaagatgaaaagataggacggatgtgatatgaaaaaaacccaaacattttggcattgaatgatggctaaggtgttccaagtattccatcttttaagatgaattgcttaattaattgcctcgctaccccaggattctcattctttggaaataatttttattaaatttcaataaactgtgaatcccaatggtattttactttacaacatggatgggctcatccttatctttaggtcatttggtcagaatcctcccgagaagactgatgaagagtatggaatcatgttccaattctatattcttaattatccttattcctgatgctactgcattgctgggtttccatagccaaggcctaagaacaggaggagaaggcaatgcttgtgggagggaggtcccaataccaaaattctgggcactaacctggtgtctgcagcccgttcccgttagcctcggggatgtcacctcacccacagcctgggatctgacgttcttcctcagactggagtaaggagtgatggaccgtaaaatgctgtgtaatgataaaaggctgaaatatccactgaatgattaaaaccaactctaataatctg

SEQ ID NO: 7801 - protein, 49 aa, Homo sapiens; identical to SEQ ID NO: 7799

SEQ ID NO: 7802 - DNA, 480 bp, Homo sapiens
gagtacacacaactgtgatagaccaccaagtacaggggtgatggaatgtcgaaaaacctttggagaaccttatctttaagatgtatttaacttgaaagctgctatttggcactttatctcagagcaagaagagaaagagcaggctgtctctttgagaagacccttgtccttcgtgctaaagttagcatgtgctgcctcttcctgtctggatataagactaagctttatttcaaaactgaaccctctagcagctgcataccagtttaccttaatatccttagtacttggtgtcttaacatcctcatactaccttgctcctttggcctcaaagtaagcatattggctggcttatatttcttaacaaaattagcagtacacaaattgaagaattttcatctttgattacaaaagtctgcgcatgtgcttgtactctgagatggtaatagattcttctgataaagttattgctgcctttccaca

SEQ ID NO: 7803 - protein, 71 aa, Homo sapiens
MCCLFLSGYKTKLYFKTEPSSSCIPVYLNILSTWCLNILILPCSFGLKVSILAGLYFLTKLAVHKLKNFHL

SEQ ID NO: 7804 - DNA, 1279 bp, Homo sapiens
gtagagtccacgacacttggactggaggtatcttggagtcctgagacttagaatcagttcagctgcagaaaacccaccttttgagttcacaccattagtgaatagcaccatgctgaaacatttcacagcttccaactctgggaaataatggagagagtttaaaaatgtaaaacttcagttagtttggggctgaacttgcttacttgaaaaatctggtgctaggcacatatatctgcctctcctttgtaaataccactccaatattattctttactattcagatccaagcttcatgttctacttgttcttcatgttctttaaatcatttgaaagttgtcaactgagagaaacatttcagaggggggaggcttttggcactggtgataaacatccctccaagagaaccgtctggggttctcttctatttgtggttggtggtttttattcttttaaaaacagctttcattgttgtttactttttgtgtaatacaaacaaaatgtaggaatcatagtttattgatttcaaatggctgacaaagaatgagtaaaaccattctttatggttttacgattcagactcatttggaaaagcgaatgtaatttttacctcctctttccaccccaagttttgtttctgcttttggagagggttgtatttcccctacttttaatcccagcactttgggaggctgaagcagggaggattgcttgagtccaggagttcaaaaccagcctgagcaacatagagagaccctgtctctacaaaaaaattttttaaatttgctcggtatggtggctcatgcttggtaatcccagctactcgggaggctgaagcaggaggatcactttgagcctgggggtttggggctgcaatgagctgtgatcatgccattgcactctagcctggattacagagcaagaccctgtctcaaaaaaaaaaaaaaaaaaaaaaaaaaaaaccagaaaatatcaatcatttaaaataactctatacaaacttttcttcaattttctgttaaccatacattttggagaataatggccaatcatgttggagagaaatgcccttttgctacagcatctgtcttttattttcttactcttagttttgtttatatgtttaaatggttgacaataaaccatgtcctgtgctgatgtagcttgtttactacgtcctaccattatgttctaaatggcacagatttgtattccatatcgtatttcaaatattctactttttcctcctagtgttaggtggagaaatatgcagctgttcatc

SEQ ID NO: 7805 - protein, 50 aa, Homo sapiens
MVLRFRLIWKSECNFYLLFPPQVLFLLLERVVFPLLLIPALWEAEAGRIA

SEQ ID NO: 7806 - DNA, 3449 bp, Homo sapiens
agggaaacaatattcttagttattgtctatttaagaccacagaaagctttagacctttttttgtcattatttgtcttattttttgctttcttcattcttggattcctatttctttatctattgcccttaatttatttttagtgctttgtaacttaatatctgtcagttgctgcttaatttctttctcctttctacacagaacattttccttcatctgttcttttgttcgtttacagcccaaaaatatccaatggtccatttattgcaaaaaagtgataactcatttaaccaggaactgttgaaaagtatggtaaaaagcattaaaatgaatgatgtctatggaccaatgagtcagattttagagacactgaataagtgtccacattttaaaagacagaggagtttatacagagaaatactatttctctcacttgtggcactgggaagagaaaacattgatatagatgcttttgataaagagtacaagatggcatacgatcgtctcacacctagtcaagtcaagagtacacacaactgtgatagaccaccaagtacaggggtgatggaatgtcgaaaaacctttggagaaccttatctttaagatgtatttgtatgtgtaaacattcaatgtatattgtatagtcagtgtataaaataacacttttagactctaaatattttttcttcaatttttgaaaatacaatttgtaaatggttcaaaagactcagacagcttatgtacagaatgtttgaagaagagaatagtgacaagtggggagaaagccactttgtttctcatttcttttttcttcttctttaactcccctgtaataggaaataaagtatttttgtgatgaggaaatccctaaacaaaattagttgccataaaatatgacaactgctttatggtttcttttggaagagacagattgaaaaatcatgaatggaatctaaacagaaatgtcagatgaacgtatttcctgttttcatagactattcaaatgttttgaccatgaagttgtattatacatattttaaattgtttatagtaagttgatatttttttaatttttaaatttaatatagcaaacttaaaatgaatttaaacttaagcaagcaagcgtgtattttccttgtctgctgctatttgaagtaattagtacagctgcagatctctctgtgtatatctatctatatatatattttttattacttgggagaatgaattttaaaatgtcagtgctagtgtcaagtgttgtcctaggattgcatgttagtacccctaagcctgagtgtggggagtgagttatgcaagggtagcgtgcactgcccagactgactcatggagccttgtgcaaggagagccagagaggttcactataccatgactccaaaattgtctctattgctaatagatacgtatagtatacagggaaaacagcttataaatccaaatatcaatttaaattttaatattctacatgaaaacttacattgggaaatatgcagacaagtgattatattccaaattttacccttattttaatatctaaaatattgggtatgatgcaaattatactatagaatatttatctgaaatatgacttactggggtattctgttaatactatatataaatattcagaatttttttcaaaagtagaaaaattcccctctaaaagtacagccagatagattttcatccatattgaggaacttagctttttcaacaagcttcagaatctgaagtctgtagaatctaaaatacagaaatatccagaaatcagacaataaattgaaagtttagacatcatgagtattaaatagctttaaaaatatatttttagtcatattatttctaatgtaactttctttgggtaatttctggtaaggaaaaacatcttttggctgctagaattagttatagattttcaatatgtgtgtgtgtttgcacacattatcattagtgaaggaattccctagccagctttaaagaaggaaaaaatggatagtcccaaattaggtgtataaagccagtagagtccacgacacttggactggaggtatcttggagtcctgagacttagaatcagttcagctgcagaaaacccaccttttgagttcacaccattagtgaatagcaccatgctgaaacatttcacagcttccaactctgggaaataatggagagagtttaaaaatgtaaaacttcagttagtttggggctgaacttgcttacttgaaaaatctggtgctaggcacatatatctgcctctcctttgtaaataccactccaatattattctttactattcagatccaagcttcatgttctacttgttcttcatgttctttaaatcatttgaaagttgtcaactgagagaaacatttcagaggggggaggcttttggcactggtgataaacatccctccaagagaaccgtctggggttctcttctatttgtggttggtggtttttattcttttaaaaacagctttcattgttgtttactttttgtgtaatacaaacaaaatgtaggaatcatagtttattgatttcaaatggctgacaaagaatgagtaaaaccattctttatggttttacgattcagactcatttggaaaagcgaatgtaatttttacctcctctttccaccccaagttttgtttctgcttttggagagggttgtatttcccctacttttaatccctagggaatattattgcacagatttagtcttaaaacctaaaacacaaatacaaagtggtaaacctgttcaaaagaaaattaaaatgtgaatcattcttgagctgggcgtggttgctcatggaggcctgtaatcccagcactttgggaggctgaagcagggaggattgcttgagtccaggagttcaaaaccagcctgagcaacatagagagaccctgtctctacaaaaaaattttttaaatttgctcggtatggtggctcatgcttggtaatcccagctactcgggaggctgaagcaggaggatcactttgagcctgggggtttggggctgcaatgagctgtgatcatgccattgcactctagcctggattacagagcaagaccctgtctcaaaaaaaaaaaaaaaaaaaaaaaaaaaaaccagaaaatatcaatcatttaaaataactctatacaaacttttcttcaattttctgttaaccatacattttggagaataatggccaatcatgttggagagaaatgcccttttgctacagcatctgtcttttattttcttactcttagttttgtttatatgtttaaatggttgacaataaaccatgtcctgtgctgatgtagcttgtttactacgtcctaccattatgttctaaatggcacagatttgtattccatatcgtatttcaaatattctactttttcctcctagtgttaggtggagaaatatgcagctgttcatc

SEQ ID NO: 7807 - protein, 116 aa, Homo sapiens
MVHLLQKSDNSFNQELLKSMVKSIKMNDVYGPMSQILETLNKCPHFKRQRSLYREILFLSLVALGRENIDIDAFDKEYKMAYDRLTPSQVKSTHNCDRPPSTGVMECRKTFGEPYL

SEQ ID NO: 7808 - DNA, 5622 bp, Homo sapiens
tgtcagagagtgagagtacaaaaggaagtgctgattgccttcctaagctcagttatcaaaattcttccagtatcgttcgcctcactggtacaagtaacaacagtgctggtaaaatatcaggagaaagcatggaaagcacacctgagctgctcttaatatcatctcttgaagatacaaatgaaacacgaaacattcaaagtagatgcttcaggaaaagacataaaagtgacaatgaaactaatttgcagcagcaagtggtctggggaaatagaaaccgtaatcttagtggaggggtactgatgggatttatgctcaatagaattaaccaggaagcaacccctggagatatagttgaaaaattgggagctgatgcaaaaattctttcaaatgttatctcaaaaagcacgagaccaaatactcttgatattgggaagccacctttaagatcaaaaagagacagtctagaaaaggaatctagtgatgatgatacaccttttgatggttctaactatttggcagataaagtggattctcctgttatttttgacttagaagacttagacagtgaaacagatgtatcaaaagcaggatgtgttgctacacaaaatcccaagaggattcaacgtatgaacagcagcttttcagtaaaaccttttgaaaaaactgatgtcgcaacaggatttgatcccctctctcttttggttgctgagactgaacagcagcaaaaagaagaagaggaggaggatgaagatgatagcaaaagcatttcaacaccatctgctaggcgtgatttagctgaagaaattgtgatgtatatgaataacatgagcagtcctttgacaagtcgtacaccaagcattgatttacaacgggcatgtgatgataaattaaataagaaaagtccaccattggtcaaggcatgcagaagatctagtctgcctcctaattctcctaagccagtgagacttaccaaatctaaaagttacacaaaaagtgaggagaaaccaagggatagactttggtcttctccagccttctcacctacttgcccatttagggaagaatctcaggatacattaacccactcatcaccttcatttaacttagatacactactagtacctaaactagatgttctaagaaacagtatgttcactgctggaaaaggagttgcagagaaagcaagcaaatggtattcaagattcaccatgtacaccacatcatctaaggatcaaagttctgatcgtaccagtctttcttcagtgggagcccaggattctgaatctacctctttaacagatgaagatgtctgccatgagttggaaggacctatctcctctcaagagaccagtgctacttcagggactaagagaattgatctcagccgaataagcctggaaagttctgcatccttggaaggatctctgtcgaagtttgccttacctgggaaatcagaagtgacatcttccttcaacgcgagtaatacaaatatcttccagaactatgcaatggaggttctcatctcaagttgctctcggtgtagaacttgtgattgtcttgtccatgatgaggaaatcatggctggctggacagcagatgattcaaatctcaatactacatgcccattctgtggcaatatcttcttaccctttctgaatatagaaataagagatttaagacgacctggaagatactttctaaagtcaagcccatcaacagaaaatatgcactttccatcctccatttcaagtcagacgaggcagtcttgcatttcaacatcagcctctggtcttgacacatctgctctctctgttcaagggaattttgatctaaatagcaaatctaaactgcaggaaaatttttgcacccgaagtattcagatccctgctaatagatcaaaaacagctatgtctaaatgtccaatatttccaatggccaggagtattagtacttctggccccttggataaggaagatactggaagacagaagctcatttctacaggcagcctgccagctactttacaaggagctacagattctttaggtttagaatggcaccttccaagtcccgatcctgtcactgttccgtatcttagtcctttagtggtatggaaagaacttgaaagcttattggaaaatgaaggtgatcatgcaataacagtagcagactttgtggaccatcatccaattgttttttggaacctggtatggtatttcagacgtcttgacttgcccagtaacttacctggattgattctttcttctgagcactgtaacaagtattcaaagattccccgccactgtatgtctgaagatagcaaatatgttttaatacaaatgttatgggacaatatgaagttacatcaggatccgggacagcccttgtacattctctggaatgcacacacccaaaaatatccaatggtccatttattgcaaaaaagtgataactcatttaaccaggaactgttgaaaagtatggtaaaaagcattaaaatgaatgatgtctatggaccaatgagtcagattttagagacactgaataagtgtccacattttaaaagacagaggagtttatacagagaaatactatttctctcacttgtggcactgggaagagaaaacattgatatagatgcttttgataaagagtacaagatggcatacgatcgtctcacacctagtcaagtcaagagtacacacaactgtgatagaccaccaagtacaggggtgatggaatgtcgaaaaacctttggagaaccttatctttaagatgtatttgtatgtgtaaacattcaatgtatattgtatagtcagtgtataaaataacacttttagactctaaatattttttcttcaatttttgaaaatacaatttgtaaatggttcaaaagactcagacagcttatgtacagaatgtttgaagaagagaatagtgacaagtggggagaaagccactttgtttctcatttcttttttcttcttctttaactcccctgtaataggaaataaagtatttttgtgatgaggaaatccctaaacaaaattagttgccataaaatatgacaactgctttatggtttcttttggaagagacagattgaaaaatcatgaatggaatctaaacagaaatgtcagatgaacgtatttcctgttttcatagactattcaaatgttttgaccatgaagttgtattatacatattttaaattgtttatagtaagttgatatttttttaatttttaaatttaatatagcaaacttaaaatgaatttaaacttaagcaagcaagcgtgtattttccttgtctgctgctatttgaagtaattagtacagctgcagatctctctgtgtatatctatctatatatatattttttattacttgggagaatgaattttaaaatgtcagtgctagtgtcaagtgttgtcctaggattgcatgttagtacccctaagcctgagtgtggggagtgagttatgcaagggtagcgtgcactgcccagactgactcatggagccttgtgcaaggagagccagagaggttcactataccatgactccaaaattgtctctattgctaatagatacgtatagtatacagggaaaacagcttataaatccaaatatcaatttaaattttaatattctacatgaaaacttacattgggaaatatgcagacaagtgattatattccaaattttacccttattttaatatctaaaatattgggtatgatgcaaattatactatagaatatttatctgaaatatgacttactggggtattctgttaatactatatataaatattcagaatttttttcaaaagtagaaaaattcccctctaaaagtacagccagatagattttcatccatattgaggaacttagctttttcaacaagcttcagaatctgaagtctgtagaatctaaaatacagaaatatccagaaatcagacaataaattgaaagtttagacatcatgagtattaaatagctttaaaaatatatttttagtcatattatttctaatgtaactttctttgggtaatttctggtaaggaaaaacatcttttggctgctagaattagttatagattttcaatatgtgtgtgtgtttgcacacattatcattagtgaaggaattccctagccagctttaaagaaggaaaaaatggatagtcccaaattaggtgtataaagccagtagagtccacgacacttggactggaggtatcttggagtcctgagacttagaatcagttcagctgcagaaaacccaccttttgagttcacaccattagtgaatagcaccatgctgaaacatttcacagcttccaactctgggaaataatggagagagtttaaaaatgtaaaacttcagttagtttggggctgaacttgcttacttgaaaaatctggtgctaggcacatatatctgcctctcctttgtaaataccactccaatattattctttactattcagatccaagcttcatgttctacttgttcttcatgttctttaaatcatttgaaagttgtcaactgagagaaacatttcagaggggggaggcttttggcactggtgataaacatccctccaagagaaccgtctggggttctcttctatttgtggttggtggtttttattcttttaaaaacagctttcattgttgtttactttttgtgtaatacaaacaaaatgtaggaatcatagtttattgatttcaaatggctgacaaagaatgagtaaaaccattctttatggttttacgattcagactcatttggaaaagcgaatgtaatttttacctcctctttccaccccaagttttgtttctgcttttggagagggttgtatttcccctacttttaatccctagggaatattattgcacagatttagtcttaaaacctaaaacacaaatacaaagtggtaaacctgttcaaaagaaaattaaaatgtgaatcattcttgagctgggcgtggttgctcatggaggcctgtaatcccagcactttgggaggctgaagcagggaggattgcttgagtccaggagttcaaaaccagcctgagcaacatagagagaccctgtctctacaaaaaaattttttaaatttgctcggtatggtggctcatgcttggtaatcccagctactcgggaggctgaagcaggaggatcactttgagcctgggggtttggggctgcaatgagctgtgatcatgccattgcactctagcctggattacagagcaagaccctgtctcaaaaaaaaaaaaaaaaaaaaaaaaaaaaaccagaaaatatcaatcatttaaaataactctatacaaacttttcttcaattttctgttaaccatacattttggagaataatggccaatcatgttggagagaaatgcccttttgctacagcatctgtcttttattttcttactcttagttttgtttatatgtttaaatggttgacaataaaccatgtcctgtgctgatgtagcttgtttactacgtcctaccattatgttctaaatggcacagatttgtattccatatcgtatttcaaatattctactttttcctcctagtgttaggtggagaaatatgcagctgttcatc

SEQ ID NO: 7809 - protein, 881 aa, Homo sapiens
MESTPELLLISSLEDTNETRNIQSRCFRKRHKSDNETNLQQQVVWGNRNRNLSGGVLMGFMLNRINQEATPGDIVEKLGADAKILSNVISKSTRPNTLDIGKPPLRSKRDSLEKESSDDDTPFDGSNYLADKVDSPVIFDLEDLDSETDVSKAGCVATQNPKRIQRMNSSFSVKPFEKTDVATGFDPLSLLVAETEQQQKEEEEEDEDDSKSISTPSARRDLAEEIVMYMNNMSSPLTSRTPSIDLQRACDDKLNKKSPPLVKACRRSSLPPNSPKPVRLTKSKSYTKSEEKPRDRLWSSPAFSPTCPFREESQDTLTHSSPSFNLDTLLVPKLDVLRNSMFTAGKGVAEKASKWYSRFTMYTTSSKDQSSDRTSLSSVGAQDSESTSLTDEDVCHELEGPISSQETSATSGTKRIDLSRISLESSASLEGSLSKFALPGKSEVTSSFNASNTNIFQNYAMEVLISSCSRCRTCDCLVHDEEIMAGWTADDSNLNTTCPFCGNIFLPFLNIEIRDLRRPGRYFLKSSPSTENMHFPSSISSQTRQSCISTSASGLDTSALSVQGNFDLNSKSKLQENFCTRSIQIPANRSKTAMSKCPIFPMARSISTSGPLDKEDTGRQKLISTGSLPATLQGATDSLGLEWHLPSPDPVTVPYLSPLVVWKELESLLENEGDHAITVADFVDHHPIVFWNLVWYFRRLDLPSNLPGLILSSEHCNKYSKIPRHCMSEDSKYVLIQMLWDNMKLHQDPGQPLYILWNAHTQKYPMVHLLQKSDNSFNQELLKSMVKSIKMNDVYGPMSQILETLNKCPHFKRQRSLYREILFLSLVALGRENIDIDAFDKEYKMAYDRLTPSQVKSTHNCDRPPSTGVMECRKTFGEPYL

SEQ ID NO: 7810 - DNA, 8192 bp, Homo sapiens
ggagaaagaggcggaggcagtggcggccgcgaggggagggggagtcccgtctgactgagacggcaggcctgggcgggcgggcgggggtgccgcgaagggcggagcgccgggctggggatgagctaagcgggctcagagcgccgcggcattcagcccctcgtgttccgctaccgcgcgtgcgggattccggcgccgctctccgagctcgatccgctgctcgcacgggagccagctgggtgttatttctcaaactctgaggctgcggagttcacacattgaaatctgtcatctttttcagagagaaactttcggtaatgtatgtaaccttctgtaatggaagatgattgaagacaaggggcctcgtgttgctgactactttgttgtagcaggattaactgatgtttcaaagcctctagaagaagaaattcacttcaatgatgcttgtcataaagtagctaaaccaaaagaacctattacagatgtttcagttattatcaaatctcttggggaggaagtcccacaggattatatctgtattgatgttaccccaactggattgtcagctgatcttaataatggaagtcttgtggggccacagatttacctttgctatagaagaggaagagataagcctccacttacagatctgggggttttatatgactggaaagaaagattgaaacagggttgtgaaattattcagagtactccctatgggcgccccgcaaatattagtgggagtacctcatcacaaagaatttatatcacttaccgaagagcctctgaaaacatgactcagaatacgttggctgtcactgacatatgtattattatacccagtaaaggagaaagcccaccacacacgttctgcaaagtcgacaagaatctcaataacagtatgtggggatcagcagtatacttgtgttataaaaaatcggtggcaaagacgaacactgtatcttacaaagctggcctaatttgtagatatcctcaagaagattatgagtcattctcactaccggaatctgttcctctattttgtttaccaatgggtgcaaccattgaatgttggccatcaaatagcaaataccctctgcctgtattttctacttttgttttaactggagcctcagctgaaaaggtttatggtgctgctattcagttttatgaaccatactctgaggagaatctcacagaaaagcagagacttcttttgggtttaacatcagcagatgggaagtctgatagttccaaaacaattcatactaacaaatgcatctgtcttctttctcactggcctttttttgatgcattcaggaagtttctgacttttctgtatcgttattccatctctgggcctcatgtccttccaattgagaagcatatttctcattttatgcataaagttccttttccatctcctcagagaccacggattttagttcagttatcaccacatgataatctgattctcagtcagcctgtgtcttcacctcttccactaagtggtggcaagttttcaacactactgcagaatttaggccctgaaaatgctgtgacactactggtgtttgcagtaacagaacataaaattcttatccattccctacggccatccgtgcttactagtgtgacagaagcattagtgtctatgattttccctttccactggccatgcccgtatgttcctctctgcccactggctttagcagatgtcttgagtgcaccatgtccattcatagtagggattgattcaagatactttgatctctatgatcctccaccagatgtcagttgtgttgatgtagataccaacactatttctcaaattggtgacaagaaaaatgtagcctggaagatacttccaaagaagccatgtaaaaatctgatgaacacactgaataatttgcatcagcaattggcaaaattgcagcagagaccgagagatgatggactcatggatttagcaataaatgactatgattttaattctggaaagaggttgcacatgatagatttggaaatccaagaggcatttttgtttttcatggcctctattttaaaaggttacagatcatacttaaggccaataacacaagccccatctgagacagccacagatgcagcctctctctttgccctacaagctttcttaagaagccgggaccggtcacatcaaaaattctataacatgatgaccaaaacacaaatgtttattcgcttcattgaagaatgttcttttgttagtgacaaagatgcaagcctggcattttttgatgattgtgtagataaagtggatatggacaagagcggtgaagtacgacttatagaactggatgaatctttcaaaagtgaacacactgtttttgtaacaccacctgagatcccccacctacccaatggtgaagaaccccctttacagtacagctataatggatttccagttcttaggaacaatttatttgaaagacctgaaggatttctacaagcaaagaagaacaaattgccttcaaaatcaagtagtcctaatagccctttgcccatgttcagaagaacaaaacaggaaattaaatcagcccataaaattgcaaagaggtactcttccatccctcagatgtggtctaggtgtctactgcgccactgttatggactgtggtttatttgtctcccagcttatgtgaaagtctgtcattcaaaagtcagggctctgaaaacagcatatgatgtgcttaaaaaaatgcagtcaaagaagatggatccacctgatgaggtatgctaccgcattcttatgcaactctgtggacaatatgatcagccagtgcttgcagttcgagtgctttttgaaatgcagaaagctggtattgaccccaatgccattacttatggttattataataaggctgttttggaaagtacctggccttcaagaagtcgtagtggctattttctttggacaaaagtaagaaatgttgttttaggagtaacacagttcaaaagagctttaaagaagcatgcacacttatcacaaacaactctctcaggtggccagtctgatcttggatataattcattatctaaagatgaagttagaagaggggatacatctactgaagacattcaagaagaaaaagataaaaaagggagtgattgtagttccttgtcagagagtgagagtacaaaaggaagtgctgattgccttcctaagctcagttatcaaaattcttccagtatcgttcgcctcactggtacaagtaacaacagtgctggtaaaatatcaggagaaagcatggaaagcacacctgagctgctcttaatatcatctcttgaagatacaaatgaaacacgaaacattcaaagtagatgcttcaggaaaagacataaaagtgacaatgaaactaatttgcagcagcaagtggtctggggaaatagaaaccgtaatcttagtggaggggtactgatgggatttatgctcaatagaattaaccaggaagcaacccctggagatatagttgaaaaattgggagctgatgcaaaaattctttcaaatgttatctcaaaaagcacgagaccaaatactcttgatattgggaagccacctttaagatcaaaaagagacagtctagaaaaggaatctagtgatgatgatacaccttttgatggttctaactatttggcagataaagtggattctcctgttatttttgacttagaagacttagacagtgaaacagatgtatcaaaagcaggatgtgttgctacacaaaatcccaagaggattcaacgtatgaacagcagcttttcagtaaaaccttttgaaaaaactgatgtcgcaacaggatttgatcccctctctcttttggttgctgagactgaacagcagcaaaaagaagaagaggaggaggatgaagatgatagcaaaagcatttcaacaccatctgctaggcgtgatttagctgaagaaattgtgatgtatatgaataacatgagcagtcctttgacaagtcgtacaccaagcattgatttacaacgggcatgtgatgataaattaaataagaaaagtccaccattggtcaaggcatgcagaagatctagtctgcctcctaattctcctaagccagtgagacttaccaaatctaaaagttacacaaaaagtgaggagaaaccaagggatagactttggtcttctccagccttctcacctacttgcccatttagggaagaatctcaggatacattaacccactcatcaccttcatttaacttagatacactactagtacctaaactagatgttctaagaaacagtatgttcactgctggaaaaggagttgcagagaaagcaagcaaatggtattcaagattcaccatgtacaccacatcatctaaggatcaaagttctgatcgtaccagtctttcttcagtgggagcccaggattctgaatctacctctttaacagatgaagatgtctgccatgagttggaaggacctatctcctctcaagagaccagtgctacttcagggactaagagaattgatctcagccgaataagcctggaaagttctgcatccttggaaggatctctgtcgaagtttgccttacctgggaaatcagaagtgacatcttccttcaacgcgagtaatacaaatatcttccagaactatgcaatggaggttctcatctcaagttgctctcggtgtagaacttgtgattgtcttgtccatgatgaggaaatcatggctggctggacagcagatgattcaaatctcaatactacatgcccattctgtggcaatatcttcttaccctttctgaatatagaaataagagatttaagacgacctggaagatactttctaaagtcaagcccatcaacagaaaatatgcactttccatcctccatttcaagtcagacgaggcagtcttgcatttcaacatcagcctctggtcttgacacatctgctctctctgttcaagggaattttgatctaaatagcaaatctaaactgcaggaaaatttttgcacccgaagtattcagatccctgctaatagatcaaaaacagctatgtctaaatgtccaatatttccaatggccaggagtattagtacttctggccccttggataaggaagatactggaagacagaagctcatttctacaggcagcctgccagctactttacaaggagctacagattctttaggtttagaatggcaccttccaagtcccgatcctgtcactgttccgtatcttagtcctttagtggtatggaaagaacttgaaagcttattggaaaatgaaggtgatcatgcaataacagtagcagactttgtggaccatcatccaattgttttttggaacctggtatggtatttcagacgtcttgacttgcccagtaacttacctggattgattctttcttctgagcactgtaacaagtattcaaagattccccgccactgtatgtctgaagatagcaaatatgttttaatacaaatgttatgggacaatatgaagttacatcaggatccgggacagcccttgtacattctctggaatgcacacacccaaaaatatccaatggtccatttattgcaaaaaagtgataactcatttaaccaggaactgttgaaaagtatggtaaaaagcattaaaatgaatgatgtctatggaccaatgagtcagattttagagacactgaataagtgtccacattttaaaagacagaggagtttatacagagaaatactatttctctcacttgtggcactgggaagagaaaacattgatatagatgcttttgataaagagtacaagatggcatacgatcgtctcacacctagtcaagtcaagagtacacacaactgtgatagaccaccaagtacaggggtgatggaatgtcgaaaaacctttggagaaccttatctttaagatgtatttgtatgtgtaaacattcaatgtatattgtatagtcagtgtataaaataacacttttagactctaaatattttttcttcaatttttgaaaatacaatttgtaaatggttcaaaagactcagacagcttatgtacagaatgtttgaagaagagaatagtgacaagtggggagaaagccactttgtttctcatttcttttttcttcttctttaactcccctgtaataggaaataaagtatttttgtgatgaggaaatccctaaacaaaattagttgccataaaatatgacaactgctttatggtttcttttggaagagacagattgaaaaatcatgaatggaatctaaacagaaatgtcagatgaacgtatttcctgttttcatagactattcaaatgttttgaccatgaagttgtattatacatattttaaattgtttatagtaagttgatatttttttaatttttaaatttaatatagcaaacttaaaatgaatttaaacttaagcaagcaagcgtgtattttccttgtctgctgctatttgaagtaattagtacagctgcagatctctctgtgtatatctatctatatatatattttttattacttgggagaatgaattttaaaatgtcagtgctagtgtcaagtgttgtcctaggattgcatgttagtacccctaagcctgagtgtggggagtgagttatgcaagggtagcgtgcactgcccagactgactcatggagccttgtgcaaggagagccagagaggttcactataccatgactccaaaattgtctctattgctaatagatacgtatagtatacagggaaaacagcttataaatccaaatatcaatttaaattttaatattctacatgaaaacttacattgggaaatatgcagacaagtgattatattccaaattttacccttattttaatatctaaaatattgggtatgatgcaaattatactatagaatatttatctgaaatatgacttactggggtattctgttaatactatatataaatattcagaatttttttcaaaagtagaaaaattcccctctaaaagtacagccagatagattttcatccatattgaggaacttagctttttcaacaagcttcagaatctgaagtctgtagaatctaaaatacagaaatatccagaaatcagacaataaattgaaagtttagacatcatgagtattaaatagctttaaaaatatatttttagtcatattatttctaatgtaactttctttgggtaatttctggtaaggaaaaacatcttttggctgctagaattagttatagattttcaatatgtgtgtgtgtttgcacacattatcattagtgaaggaattccctagccagctttaaagaaggaaaaaatggatagtcccaaattaggtgtataaagccagtagagtccacgacacttggactggaggtatcttggagtcctgagacttagaatcagttcagctgcagaaaacccaccttttgagttcacaccattagtgaatagcaccatgctgaaacatttcacagcttccaactctgggaaataatggagagagtttaaaaatgtaaaacttcagttagtttggggctgaacttgcttacttgaaaaatctggtgctaggcacatatatctgcctctcctttgtaaataccactccaatattattctttactattcagatccaagcttcatgttctacttgttcttcatgttctttaaatcatttgaaagttgtcaactgagagaaacatttcagaggggggaggcttttggcactggtgataaacatccctccaagagaaccgtctggggttctcttctatttgtggttggtggtttttattcttttaaaaacagctttcattgttgtttactttttgtgtaatacaaacaaaatgtaggaatcatagtttattgatttcaaatggctgacaaagaatgagtaaaaccattctttatggttttacgattcagactcatttggaaaagcgaatgtaatttttacctcctctttccaccccaagttttgtttctgcttttggagagggttgtatttcccctacttttaatccctagggaatattattgcacagatttagtcttaaaacctaaaacacaaatacaaagtggtaaacctgttcaaaagaaaattaaaatgtgaatcattcttgagctgggcgtggttgctcatggaggcctgtaatcccagcactttgggaggct

SEQ ID NO: 7811 - protein, 1863 aa, Homo sapiens
MIEDKGPRVADYFVVAGLTDVSKPLEEEIHFNDACHKVAKPKEPITDVSVIIKSLGEEVPQDYICIDVTPTGLSADLNNGSLVGPQIYLCYRRGRDKPPLTDLGVLYDWKERLKQGCEIIQSTPYGRPANISGSTSSQRIYITYRRASENMTQNTLAVTDICIIIPSKGESPPHTFCKVDKNLNNSMWGSAVYLCYKKSVAKTNTVSYKAGLICRYPQEDYESFSLPESVPLFCLPMGATIECWPSNSKYPLPVFSTFVLTGASAEKVYGAAIQFYEPYSEENLTEKQRLLLGLTSADGKSDSSKTIHTNKCICLLSHWPFFDAFRKFLTFLYRYSISGPHVLPIEKHISHFMHKVPFPSPQRPRILVQLSPHDNLILSQPVSSPLPLSGGKFSTLLQNLGPENAVTLLVFAVTEHKILIHSLRPSVLTSVTEALVSMIFPFHWPCPYVPLCPLALADVLSAPCPFIVGIDSRYFDLYDPPPDVSCVDVDTNTISQIGDKKNVAWKILPKKPCKNLMNTLNNLHQQLAKLQQRPRDDGLMDLAINDYDFNSGKRLHMIDLEIQEAFLFFMASILKGYRSYLRPITQAPSETATDAASLFALQAFLRSRDRSHQKFYNMMTKTQMFIRFIEECSFVSDKDASLAFFDDCVDKVDMDKSGEVRLIELDESFKSEHTVFVTPPEIPHLPNGEEPPLQYSYNGFPVLRNNLFERPEGFLQAKKNKLPSKSSSPNSPLPMFRRTKQEIKSAHKIAKRYSSIPQMWSRCLLRHCYGLWFICLPAYVKVCHSKVRALKTAYDVLKKMQSKKMDPPDEVCYRILMQLCGQYDQPVLAVRVLFEMQKAGIDPNAITYGYYNKAVLESTWPSRSRSGYFLWTKVRNVVLGVTQFKRALKKHAHLSQTTLSGGQSDLGYNSLSKDEVRRGDTSTEDIQEEKDKKGSDCSSLSESESTKGSADCLPKLSYQNSSSIVRLTGTSNNSAGKISGESMESTPELLLISSLEDTNETRNIQSRCFRKRHKSDNETNLQQQVVWGNRNRNLSGGVLMGFMLNRINQEATPGDIVEKLGADAKILSNVISKSTRPNTLDIGKPPLRSKRDSLEKESSDDDTPFDGSNYLADKVDSPVIFDLEDLDSETDVSKAGCVATQNPKRIQRMNSSFSVKPFEKTDVATGFDPLSLLVAETEQQQKEEEEEDEDDSKSISTPSARRDLAEEIVMYMNNMSSPLTSRTPSIDLQRACDDKLNKKSPPLVKACRRSSLPPNSPKPVRLTKSKSYTKSEEKPRDRLWSSPAFSPTCPFREESQDTLTHSSPSFNLDTLLVPKLDVLRNSMFTAGKGVAEKASKWYSRFTMYTTSSKDQSSDRTSLSSVGAQDSESTSLTDEDVCHELEGPISSQETSATSGTKRIDLSRISLESSASLEGSLSKFALPGKSEVTSSFNASNTNIFQNYAMEVLISSCSRCRTCDCLVHDEEIMAGWTADDSNLNTTCPFCGNIFLPFLNIEIRDLRRPGRYFLKSSPSTENMHFPSSISSQTRQSCISTSASGLDTSALSVQGNFDLNSKSKLQENFCTRSIQIPANRSKTAMSKCPIFPMARSISTSGPLDKEDTGRQKLISTGSLPATLQGATDSLGLEWHLPSPDPVTVPYLSPLVVWKELESLLENEGDHAITVADFVDHHPIVFWNLVWYFRRLDLPSNLPGLILSSEHCNKYSKIPRHCMSEDSKYVLIQMLWDNMKLHQDPGQPLYILWNAHTQKYPMVHLLQKSDNSFNQELLKSMVKSIKMNDVYGPMSQILETLNKCPHFKRQRSLYREILFLSLVALGRENIDIDAFDKEYKMAYDRLTPSQVKSTHNCDRPPSTGVMECRKTFGEPYL

SEQ ID NO: 7812 - DNA, 7269 bp, Homo sapiens
gcggccgcgaggggagggggagtcccgtctgactgagacggcaggcctgggcgggcgggcgggggtgccgcgaagggcggagcgccgggctggggatgagctaagcgggctcagagcgccgcggcattcagcccctcgtgttccgctaccgcgcgtgcgggattccggcgccgctctccgagctcgatccgctgctcgcacgggagccagctgggtgttatttctcaaactctgaggctgcggagttcacacattgaaatctgtcatctttttcagagagaaactttcggtaatgtatgtaaccttctgtaatggaagatgattgaagacaaggggcctcgtgttgctgactactttgttgtagcaggattaactgatgtttcaaagcctctagaagaagaaattcacttcaatgatgcttgtcataaagtagctaaaccaaaagaacctattacagatgtttcagttattatcaaatctcttggggaggaagtcccacaggattatatctgtattgatgttaccccaactggattgtcagctgatcttaataatggaagtcttgtggggccacagatttacctttgctatagaagaggaagagataagcctccacttacagatctgggggttttatatgactggaaagaaagattgaaacagggttgtgaaattattcagagtactccctatgggcgccccgcaaatattagtgggagtacctcatcacaaagaatttatatcacttaccgaagagcctctgaaaacatgactcagaatacgttggctgtcactgacatatgtattattatacccagtaaaggagaaagcccaccacacacgttctgcaaagtcgacaagaatctcaataacagtatgtggggatcagcagtatacttgtgttataaaaaatcggtggcaaagacgaacactgtatcttacaaagctggcctaatttgtagatatcctcaagaagattatgagtcattctcactaccggaatctgttcctctattttgtttaccaatgggtgcaaccattgaatgttggccatcaaatagcaaataccctctgcctgtattttctacttttgttttaactggagcctcagctgaaaaggtttatggtgctgctattcagttttatgaaccatactctgaggagaatctcacagaaaagcagagacttcttttgggtttaacatcagcagatgggaagtctgatagttccaaaacaattcatactaacaaatgcatctgtcttctttctcactggcctttttttgatgcattcaggaagtttctgacttttctgtatcgttattccatctctgggcctcatgtccttccaattgagaagcatatttctcattttatgcataaagttccttttccatctcctcagagaccacggattttagttcagttatcaccacatgataatctgattctcagtcagcctgtgtcttcacctcttccactaagtggtggcaagttttcaacactactgcagaatttaggccctgaaaatgctgtgacactactggtgtttgcagtaacagaacataaaattcttatccattccctacggccatccgtgcttactagtgtgacagaagcattagtgtctatgattttccctttccactggccatgcccgtatgttcctctctgcccactggctttagcagatgtcttgagtgcaccatgtccattcatagtagggattgattcaagatactttgatctctatgatcctccaccagatgtcagttgtgttgatgtagataccaacactatttctcaaattggtgacaagaaaaatgtagcctggaagatacttccaaagaagccatgtaaaaatctgatgaacacactgaataatttgcatcagcaattggcaaaattgcagcagagaccgagagatgatggactcatggatttagcaataaatgactatgattttaattctggaaagaggttgcacatgatagatttggaaatccaagaggcatttttgtttttcatggcctctattttaaaaggttacagatcatacttaaggccaataacacaagccccatctgagacagccacagatgcagcctctctctttgccctacaagctttcttaagaagccgggaccggtcacatcaaaaattctataacatgatgaccaaaacacaaatgtttattcgcttcattgaagaatgttcttttgttagtgacaaagatgcaagcctggcattttttgatgattgtgtagataaagtggatatggacaagagcggtgaagtacgacttatagaactggatgaatctttcaaaagtgaacacactgtttttgtaacaccacctgagatcccccacctacccaatggtgaagaaccccctttacagtacagctataatggatttccagttcttaggaacaatttatttgaaagacctgaaggatttctacaagcaaagaagaacaaattgccttcaaaatcaagtagtcctaatagccctttgcccatgttcagaagaacaaaacaggaaattaaatcagcccataaaattgcaaagaggtactcttccatccctcagatgtggtctaggtgtctactgcgccactgttatggactgtggtttatttgtctcccagcttatgtgaaagtctgtcattcaaaagtcagggctctgaaaacagcatatgatgtgcttaaaaaaatgcagtcaaagaagatggatccacctgatgaggtatgctaccgcattcttatgcaactctgtggacaatatgatcagccagtgcttgcagttcgagtgctttttgaaatgcagaaagctggtattgaccccaatgccattacttatggttattataataaggctgttttggaaagtacctggccttcaagaagtcgtagtggctattttctttggacaaaagtaagaaatgttgttttaggagtaacacagttcaaaagagctttaaagaagcatgcacacttatcacaaacaactctctcagatggcagtgacctggatgctgttagtcatggcagcatggatagtggtcatgggacacacactgtggagcaggcaccttttaatacgggtttaatcaaagtatatgctactgatgatagatctagtacaggtggccagtctgatcttggatataattcattatctaaagatgaagttagaagaggggatacatctactgaagacattcaagaagaaaaagataaaaaagggagtgattgtagttccttgtcagagagtgagagtacaaaaggaagtgctgattgccttcctaagctcagttatcaaaattcttccagtatcgttcgcctcactggtacaagtaacaacagtgctggtaaaatatcaggagaaagcatggaaagcacacctgagctgctcttaatatcatctcttgaagatacaaatgaaacacgaaacattcaaagtagatgcttcaggaaaagacataaaagtgacaatgaaactaatttgcagcagcaagtggtctggggaaatagaaaccgtaatcttagtggaggggtactgatgggatttatgctcaatagaattaaccaggaagcaacccctggagatatagttgaaaaattgggagctgatgcaaaaattctttcaaatgttatctcaaaaagcacgagaccaaatactcttgatattgggaagccacctttaagatcaaaaagagacagtctagaaaaggaatctagtgatgatgatacaccttttgatggttctaactatttggcagataaagtggattctcctgttatttttgacttagaagacttagacagtgaaacagatgtatcaaaagcaggatgtgttgctacacaaaatcccaagaggattcaacgtatgaacagcagcttttcagtaaaaccttttgaaaaaactgatgtcgcaacaggatttgatcccctctctcttttggttgctgagactgaacagcagcaaaaagaagaagaggaggaggatgaagatgatagcaaaagcatttcaacaccatctgctaggcgtgatttagctgaagaaattgtgatgtatatgaataacatgagcagtcctttgacaagtcgtacaccaagcattgatttacaacgggcatgtgatgataaattaaataagaaaagtccaccattggtcaaggcatgcagaagatctagtctgcctcctaattctcctaagccagtgagacttaccaaatctaaaagttacacaaaaagtgaggagaaaccaagggatagactttggtcttctccagccttctcacctacttgcccatttagggaagaatctcaggatacattaacccactcatcaccttcatttaacttagatacactactagtacctaaactagatgttctaagaaacagtatgttcactgctggaaaaggagttgcagagaaagcaagcaaatggtattcaagattcaccatgtacaccacatcatctaaggatcaaagttctgatcgtaccagtctttcttcagtgggagcccaggattctgaatctacctctttaacagatgaagatgtctgccatgagttggaaggacctatctcctctcaagagaccagtgctacttcagggactaagagaattgatctcagccgaataagcctggaaagttctgcatccttggaaggatctctgtcgaagtttgccttacctgggaaatcagaagtgacatcttccttcaacgcgagtaatacaaatatcttccagaactatgcaatggaggttctcatctcaagttgctctcggtgtagaacttgtgattgtcttgtccatgatgaggaaatcatggctggctggacagcagatgattcaaatctcaatactacatgcccattctgtggcaatatcttcttaccctttctgaatatagaaataagagatttaagacgacctggaagatactttctaaagtcaagcccatcaacagaaaatatgcactttccatcctccatttcaagtcagacgaggcagtcttgcatttcaacatcagcctctggtcttgacacatctgctctctctgttcaagggaattttgatctaaatagcaaatctaaactgcaggaaaatttttgcacccgaagtattcagatccctgctaatagatcaaaaacagctatgtctaaatgtccaatatttccaatggccaggagtattagtacttctggccccttggataaggaagatactggaagacagaagctcatttctacaggcagcctgccagctactttacaaggagctacagattctttaggtttagaatggcaccttccaagtcccgatcctgtcactgttccgtatcttagtcctttagtggtatggaaagaacttgaaagcttattggaaaatgaaggtgatcatgcaataacagtagcagactttgtggaccatcatccaattgttttttggaacctggtatggtatttcagacgtcttgacttgcccagtaacttacctggattgattctttcttctgagcactgtaacaagtattcaaagattccccgccactgtatgtctgaagatagcaaatatgttttaatacaaatgttatgggacaatatgaagttacatcaggatccgggacagcccttgtacattctctggaatgcacacacccaaaaatatccaatggtccatttattgcaaaaaagtgataactcatttaaccaggaactgttgaaaagtatggtaaaaagcattaaaatgaatgatgtctatggaccaatgagtcagattttagagacactgaataagtgtccacattttaaaagacagaggagtttatacagagaaatactatttctctcacttgtggcactgggaagagaaaacattgatatagatgcttttgataaagagtacaagatggcatacgatcgtctcacacctagtcaagtcaagagtacacacaactgtgatagaccaccaagtacaggggtgatggaatgtcgaaaaacctttggagaaccttatctttaagatgtatttgtatgtgtaaacattcaatgtatattgtatagtcagtgtataaaataacacttttagactctaaatattttttcttcaatttttgaaaatacaatttgtaaatggttcaaaagactcagacagcttatgtacagaatgtttgaagaagagaatagtgacaagtggggagaaagccactttgtttctcatttcttttttcttcttctttaactcccctgtaataggaaataaagtatttttgtgatgaggaaatccctaaacaaaattagttgccataaaatatgacaactgctttatggtttcttttggaagagacagattgaaaaatcatgaatggaatctaaacagaaatgtcagatgaacgtatttcctgttttcatagactattcaaatgttttgaccatgaagttgtattatacatattttaaattgtttatagtaagttgatatttttttaatttttaaatttaatatagcaaacttaaaatgaatttaaacttaagcaagcaagcgtgtattttccttgtctgctgctatttgaagtaattagtacagctgcagatctctctgtgtatatctatctatatatatattttttattacttgggagaatgaattttaaaatgtcagtgctagtgtcaagtgttgtcctaggattgcatgttagtacccctaagcctgagtgtggggagtgagttatgcaagggtagcgtgcactgcccagactgactcatggagccttgtgcaaggagagccagagaggttcactataccatgactccaaaattgtctctattgctaatagatacgtatagtatacagggaaaacagcttataaatccaaatatcaatttaaattttaatattctacatgaaaacttacattgggaaatatgcagacaagtgattatattccaaattttacccttattttaatatctaaaatattgggtatgatgcaaattatactatagaatatttatctgaaatatgacttactggggtattctgttaatactatatataaatattcagaatttttttcaaaagtagaaaaattcccctctaaaagtacagccagatagattttcatccatattgaggaacttagctttttcaacaagcttcagaatctgaagtctgtagaatctaaaatacagaaatatccagaaatcagacaataaattgaaagtttagacatcatgagtattaaatagcttt

SEQ ID NO: 7813 - protein, 1906 aa, Homo sapiens
MIEDKGPRVADYFVVAGLTDVSKPLEEEIHFNDACHKVAKPKEPITDVSVIIKSLGEEVPQDYICIDVTPTGLSADLNNGSLVGPQIYLCYRRGRDKPPLTDLGVLYDWKERLKQGCEIIQSTPYGRPANISGSTSSQRIYITYRRASENMTQNTLAVTDICIIIPSKGESPPHTFCKVDKNLNNSMWGSAVYLCYKKSVAKTNTVSYKAGLICRYPQEDYESFSLPESVPLFCLPMGATIECWPSNSKYPLPVFSTFVLTGASAEKVYGAAIQFYEPYSEENLTEKQRLLLGLTSADGKSDSSKTIHTNKCICLLSHWPFFDAFRKFLTFLYRYSISGPHVLPIEKHISHFMHKVPFPSPQRPRILVQLSPHDNLILSQPVSSPLPLSGGKFSTLLQNLGPENAVTLLVFAVTEHKILIHSLRPSVLTSVTEALVSMIFPFHWPCPYVPLCPLALADVLSAPCPFIVGIDSRYFDLYDPPPDVSCVDVDTNTISQIGDKKNVAWKILPKKPCKNLMNTLNNLHQQLAKLQQRPRDDGLMDLAINDYDFNSGKRLHMIDLEIQEAFLFFMASILKGYRSYLRPITQAPSETATDAASLFALQAFLRSRDRSHQKFYNMMTKTQMFIRFIEECSFVSDKDASLAFFDDCVDKVDMDKSGEVRLIELDESFKSEHTVFVTPPEIPHLPNGEEPPLQYSYNGFPVLRNNLFERPEGFLQAKKNKLPSKSSSPNSPLPMFRRTKQEIKSAHKIAKRYSSIPQMWSRCLLRHCYGLWFICLPAYVKVCHSKVRALKTAYDVLKKMQSKKMDPPDEVCYRILMQLCGQYDQPVLAVRVLFEMQKAGIDPNAITYGYYNKAVLESTWPSRSRSGYFLWTKVRNVVLGVTQFKRALKKHAHLSQTTLSDGSDLDAVSHGSMDSGHGTHTVEQAPFNTGLIKVYATDDRSSTGGQSDLGYNSLSKDEVRRGDTSTEDIQEEKDKKGSDCSSLSESESTKGSADCLPKLSYQNSSSIVRLTGTSNNSAGKISGESMESTPELLLISSLEDTNETRNIQSRCFRKRHKSDNETNLQQQVVWGNRNRNLSGGVLMGFMLNRINQEATPGDIVEKLGADAKILSNVISKSTRPNTLDIGKPPLRSKRDSLEKESSDDDTPFDGSNYLADKVDSPVIFDLEDLDSETDVSKAGCVATQNPKRIQRMNSSFSVKPFEKTDVATGFDPLSLLVAETEQQQKEEEEEDEDDSKSISTPSARRDLAEEIVMYMNNMSSPLTSRTPSIDLQRACDDKLNKKSPPLVKACRRSSLPPNSPKPVRLTKSKSYTKSEEKPRDRLWSSPAFSPTCPFREESQDTLTHSSPSFNLDTLLVPKLDVLRNSMFTAGKGVAEKASKWYSRFTMYTTSSKDQSSDRTSLSSVGAQDSESTSLTDEDVCHELEGPISSQETSATSGTKRIDLSRISLESSASLEGSLSKFALPGKSEVTSSFNASNTNIFQNYAMEVLISSCSRCRTCDCLVHDEEIMAGWTADDSNLNTTCPFCGNIFLPFLNIEIRDLRRPGRYFLKSSPSTENMHFPSSISSQTRQSCISTSASGLDTSALSVQGNFDLNSKSKLQENFCTRSIQIPANRSKTAMSKCPIFPMARSISTSGPLDKEDTGRQKLISTGSLPATLQGATDSLGLEWHLPSPDPVTVPYLSPLVVWKELESLLENEGDHAITVADFVDHHPIVFWNLVWYFRRLDLPSNLPGLILSSEHCNKYSKIPRHCMSEDSKYVLIQMLWDNMKLHQDPGQPLYILWNAHTQKYPMVHLLQKSDNSFNQELLKSMVKSIKMNDVYGPMSQILETLNKCPHFKRQRSLYREILFLSLVALGRENIDIDAFDKEYKMAYDRLTPSQVKSTHNCDRPPSTGVMECRKTFGEPYL

SEQ ID NO: 7814 - DNA, 1114 bp, Homo sapiens
agggaaacaatattcttagttattgtctatttaagaccacagaaagctttagacctttttttgtcattatttgtcttattttttgctttcttcattcttggattcctatttctttatctattgcccttaatttatttttagtgctttgtaacttaatatctgtcagttgctgcttaatttctttctcctttctacacagaacattttccttcatctgttcttttgttcgtttacagcccaaaaatatccaatggtccatttattgcaaaaaagtgataactcatttaaccaggaactgttgaaaagtatggtaaaaagcattaaaatgaatgatgtctatggaccaatgagtcagattttagagacactgaataagtgtccacattttaaaagacagaggagtttatacagagaaatactatttctctcacttgtggcactgggaagagaaaacattgatatagatgcttttgataaagagtacaagatggcatacgatcgtctcacacctagtcaagtcaagagtacacacaactgtgatagaccaccaagtacaggggtgatggaatgtcgaaaaacctttggagaaccttatctttaagatgtatttgtatgtgtaaacattcaatgtatattgtatagtcagtgtataaaataacacttttagactctaaatattttttcttcaatttttgaaaatacaatttgtaaatggttcaaaagactcagacagcttatgtacagaatgtttgaagaagagaatagtgacaagtggggagaaagccactttgtttctcatttcttttttcttcttctttaactcccctgtaataggaaataaagtatttttgtgatgaggaaatccctaaacaaaattagttgccataaaatatgacaactgctttatggtttcttttggaagagacagattgaaaaatcatgaatggaatctaaacagaaatgtcagatgaacgtatttcctgttttcatagactattcaaatgttttgaccatgaagttgtattatacatattttaaattgtttatagtaagttgatatttttttaatttttaaatttaatatagcaaacttaaaatgaatttaaacttaagc

SEQ ID NO: 7815 - protein, 116 aa, Homo sapiens; identical to SEQ ID NO: 7807

SEQ ID NO: 7816 - DNA, 867 bp, Homo sapiens
agggaaacaatattcttagttattgtctatttaagaccacagaaagctttagacctttttttgtcattatttgtcttattttttgctttcttcattcttggattcctatttctttatctattgcccttaatttatttttagtgctttgtaacttaatatctgtcagttgctgcttaatttctttctcctttctacacagaacattttccttcatctgttcttttgttcgtttacagcccaaaaatatccaatggtccatttattgcaaaaaagtgataactcatttaaccaggaactgttgaaaagtatggtaaaaagcattaaaatgaatgatgtctatggaccaatgagtcagattttagagacactgaataagtgtccacattttaaaagacagaggagtttatacagagaaatactatttctctcacttgtggcactgggaagagaaaacattgatatagatgcttttgataaagagtacaagatggcatacgatcgtctcacacctagtcaagtcaagagtacacacaactgtgatagaccaccaagtacaggggtgatggaatgtcgaaaaacctttggagaaccttatctttaagatgtatttgtatgtgtaaacattcaatgtatattgtatagtcagtgtataaaataacacttttagactctaaatattttttcttcaatttttgaaaatacaatttgtaaatggttcaaaagactcagacagcttatgtacagaatgtttgaagaagagaatagtgacaagtggggagaaagccactttgtttctcatttcttttttcttcttctttaactcccctgtaataggaaataaagtatttttgtgatgaggaaatccct

SEQ ID NO: 7817 - protein, 116 aa, Homo sapiens; identical to SEQ ID NO: 7807

SEQ ID NO: 7818 - DNA, 6003 bp, Homo sapiens
ggagaaagaggcggaggcagtggcggccgcgaggggagggggagtcccgtctgactgagacggcaggcctgggcgggcgggcgggggtgccgcgaagggcggagcgccgggctggggatgagctaagcgggctcagagcgccgcggcattcagcccctcgtgttccgctaccgcgcgtgcgggattccggcgccgctctccgagctcgatccgctgctcgcacgggagccagctgggtgttatttctcaaactctgaggctgcggagttcacacattgaaatctgtcatctttttcagagagaaactttcggtaatgtatgtaaccttctgtaatggaagatgattgaagacaaggggcctcgtgttgctgactactttgttgtagcaggattaactgatgtttcaaagcctctagaagaagaaattcacttcaatgatgcttgtcataaagtagctaaaccaaaagaacctattacagatgtttcagttattatcaaatctcttggggaggaagtcccacaggattatatctgtattgatgttaccccaactggattgtcagctgatcttaataatggaagtcttgtggggccacagatttacctttgctatagaagaggaagagataagcctccacttacagatctgggggttttatatgactggaaagaaagattgaaacagggttgtgaaattattcagagtactccctatgggcgccccgcaaatattagtgggagtacctcatcacaaagaatttatatcacttaccgaagagcctctgaaaacatgactcagaatacgttggctgtcactgacatatgtattattatacccagtaaaggagaaagcccaccacacacgttctgcaaagtcgacaagaatctcaataacagtatgtggggatcagcagtatacttgtgttataaaaaatcggtggcaaagacgaacactgtatcttacaaagctggcctaatttgtagatatcctcaagaagattatgagtcattctcactaccggaatctgttcctctattttgtttaccaatgggtgcaaccattgaatgttggccatcaaatagcaaataccctctgcctgtattttctacttttgttttaactggagcctcagctgaaaaggtttatggtgctgctattcagttttatgaaccatactctgaggagaatctcacagaaaagcagagacttcttttgggtttaacatcagcagatgggaagtctgatagttccaaaacaattcatactaacaaatgcatctgtcttctttctcactggcctttttttgatgcattcaggaagtttctgacttttctgtatcgttattccatctctgggcctcatgtccttccaattgagaagcatatttctcattttatgcataaagttccttttccatctcctcagagaccacggattttagttcagttatcaccacatgataatctgattctcagtcagcctgtgtcttcacctcttccactaagtggtggcaagttttcaacactactgcagaatttaggccctgaaaatgctgtgacactactggtgtttgcagtaacagaacataaaattcttatccattccctacggccatccgtgcttactagtgtgacagaagcattagtgtctatgattttccctttccactggccatgcccgtatgttcctctctgcccactggctttagcagatgtcttgagtgcaccatgtccattcatagtagggattgattcaagatactttgatctctatgatcctccaccagatgtcagttgtgttgatgtagataccaacactatttctcaaattggtgacaagaaaaatgtagcctggaagatacttccaaagaagccatgtaaaaatctgatgaacacactgaataatttgcatcagcaattggcaaaattgcagcagagaccgagagatgatggactcatggatttagcaataaatgactatgattttaattctggaaagaggttgcacatgatagatttggaaatccaagaggcatttttgtttttcatggcctctattttaaaaggttacagatcatacttaaggccaataacacaagccccatctgagacagccacagatgcagcctctctctttgccctacaagctttcttaagaagccgggaccggtcacatcaaaaattctataacatgatgaccaaaacacaaatgtttattcgcttcattgaagaatgttcttttgttagtgacaaagatgcaagcctggcattttttgatgattgtgtagataaagtggatatggacaagagcggtgaagtacgacttatagaactggatgaatctttcaaaagtgaacacactgtttttgtaacaccacctgagatcccccacctacccaatggtgaagaaccccctttacagtacagctataatggatttccagttcttaggaacaatttatttgaaagacctgaaggatttctacaagcaaagaagaacaaattgccttcaaaatcaagtagtcctaatagccctttgcccatgttcagaagaacaaaacaggaaattaaatcagcccataaaattgcaaagaggtactcttccatccctcagatgtggtctaggtgtctactgcgccactgttatggactgtggtttatttgtctcccagcttatgtgaaagtctgtcattcaaaagtcagggctctgaaaacagcatatgatgtgcttaaaaaaatgcagtcaaagaagatggatccacctgatgaggtatgctaccgcattcttatgcaactctgtggacaatatgatcagccagtgcttgcagttcgagtgctttttgaaatgcagaaagctggtattgaccccaatgccattacttatggttattataataaggctgttttggaaagtacctggccttcaagaagtcgtagtggctattttctttggacaaaagtaagaaatgttgttttaggagtaacacagttcaaaagagctttaaagaagcatgcacacttatcacaaacaactctctcaggtggccagtctgatcttggatataattcattatctaaagatgaagttagaagaggggatacatctactgaagacattcaagaagaaaaagataaaaaagggagtgattgtagttccttgtcagagagtgagagtacaaaaggaagtgctgattgccttcctaagctcagttatcaaaattcttccagtatcgttcgcctcactggtacaagtaacaacagtgctggtaaaatatcaggagaaagcatggaaagcacacctgagctgctcttaatatcatctcttgaagatacaaatgaaacacgaaacattcaaagtagatgcttcaggaaaagacataaaagtgacaatgaaactaatttgcagcagcaagtggtctggggaaatagaaaccgtaatcttagtggaggggtactgatgggatttatgctcaatagaattaaccaggaagcaacccctggagatatagttgaaaaattgggagctgatgcaaaaattctttcaaatgttatctcaaaaagcacgagaccaaatactcttgatattgggaagccacctttaagatcaaaaagagacagtctagaaaaggaatctagtgatgatgatacaccttttgatggttctaactatttggcagataaagtggattctcctgttatttttgacttagaagacttagacagtgaaacagatgtatcaaaagcaggatgtgttgctacacaaaatcccaagaggattcaacgtatgaacagcagcttttcagtaaaaccttttgaaaaaactgatgtcgcaacaggatttgatcccctctctcttttggttgctgagactgaacagcagcaaaaagaagaagaggaggaggatgaagatgatagcaaaagcatttcaacaccatctgctaggcgtgatttagctgaagaaattgtgatgtatatgaataacatgagcagtcctttgacaagtcgtacaccaagcattgatttacaacgggcatgtgatgataaattaaataagaaaagtccaccattggtcaaggcatgcagaagatctagtctgcctcctaattctcctaagccagtgagacttaccaaatctaaaagttacacaaaaagtgaggagaaaccaagggatagactttggtcttctccagccttctcacctacttgcccatttagggaagaatctcaggatacattaacccactcatcaccttcatttaacttagatacactactagtacctaaactagatgttctaagaaacagtatgttcactgctggaaaaggagttgcagagaaagcaagcaaatggtattcaagattcaccatgtacaccacatcatctaaggatcaaagttctgatcgtaccagtctttcttcagtgggagcccaggattctgaatctacctctttaacagatgaagatgtctgccatgagttggaaggacctatctcctctcaagagaccagtgctacttcagggactaagagaattgatctcagccgaataagcctggaaagttctgcatccttggaaggatctctgtcgaagtttgccttacctgggaaatcagaagtgacatcttccttcaacgcgagtaatacaaatatcttccagaactatgcaatggaggttctcatctcaagttgctctcggtgtagaacttgtgattgtcttgtccatgatgaggaaatcatggctggctggacagcagatgattcaaatctcaatactacatgcccattctgtggcaatatcttcttaccctttctgaatatagaaataagagatttaagacgacctggaagatactttctaaagtcaagcccatcaacagaaaatatgcactttccatcctccatttcaagtcagacgaggcagtcttgcatttcaacatcagcctctggtcttgacacatctgctctctctgttcaagggaattttgatctaaatagcaaatctaaactgcaggaaaatttttgcacccgaagtattcagatccctgctaatagatcaaaaacagctatgtctaaatgtccaatatttccaatggccaggagtattagtacttctggccccttggataaggaagatactggaagacagaagctcatttctacaggcagcctgccagctactttacaaggagctacagattctttaggtttagaatggcaccttccaagtcccgatcctgtcactgttccgtatcttagtcctttagtggtatggaaagaacttgaaagcttattggaaaatgaaggtgatcatgcaataacagtagcagactttgtggaccatcatccaattgttttttggaacctggtatggtatttcagacgtcttgacttgcccagtaacttacctggattgattctttcttctgagcactgtaacaagtattcaaagattccccgccactgtatgtctgaagatagcaaatatgttttaatacaaatgttatgggacaatatgaagttacatcaggatccgggacagcccttgtacattctctggaatgcacacacccaaaaatatccaatggtccatttattgcaaaaaagtgataactcatttaaccaggaactgttgaaaagtatggtaaaaagcattaaaatgaatgatgtctatggaccaatgagtcagattttagagacactgaataagtgtccacattttaaaagacagaggagtttatacagagaaatactatttctctcacttgtggcactgggaagagaaaacattgatatagatgcttttgataaagagtacaagatggcatacgatcgtctcacacctagtcaagtcaagagtacacacaactgtgatagaccaccaagtacaggggtgatggaatgtcgaaaaacctttggagaaccttatctttaagatgtatttgtatgtgtaaacattcaatgtatattgtatagtcagtgtataaaataacacttttagactct

SEQ ID NO: 7819 - protein, 1863 aa, Homo sapiens; identical to SEQ ID NO: 7811

SEQ ID NO: 7820 - DNA, 3837 bp, Homo sapiens
gcggggcttggcgggggcccagcatttccggggacgccgcgccggactgaggctgtgcgcccgagactccgggtccccaggggctgcgccgggccggcctggcaagggggacgagtcagtggacactccaggaagagcggccccgcggggggcgatgaccgtgcgctgaccctgactcactccaggtccggaggcgggggcccccggggcgactcgggggcggaccgcggggcggagctgccgcccgtgagtccggccgagccacctgagcccgagccgcgggacaccgtcgctcctgctctccgaatgctgcgcaccgcgatgggcctgaggagctggctcgccgccccatggggcgcgctgccgcctcggccaccgctgctgctgctcctgctgctgctgctcctgctgcagccgccgcctccgacctgggcgctcagcccccggatcagcctgcctctgggctctgaagagcggccattcctcagattcgaagctgaacacatctccaactacacagcccttctgctgagcagggatggcaggaccctgtacgtgggtgctcgagaggccctctttgcactcagtagcaacctcagcttcctgccaggcggggagtaccaggagctgctttggggtgcagacgcagagaagaaacagcagtgcagcttcaagggcaaggacccacagcgcgactgtcaaaactacatcaagatcctcctgccgctcagcggcagtcacctgttcacctgtggcacagcagccttcagccccatgtgtacctacatcaacatggagaacttcaccctggcaagggacgagaaggggaatgtcctcctggaagatggcaagggccgttgtcccttcgacccgaatttcaagtccactgccctggtggttgatggcgagctctacactggaacagtcagcagcttccaagggaatgacccggccatctcgcggagccaaagccttcgccccaccaagaccgagagctccctcaactggctgcaagacccagcttttgtggcctcagcctacattcctgagagcctgggcagcttgcaaggcgatgatgacaagatctactttttcttcagcgagactggccaggaatttgagttctttgagaacaccattgtgtcccgcattgcccgcatctgcaagggcgatgagggtggagagcgggtgctacagcagcgctggacctccttcctcaaggcccagctgctgtgctcacggcccgacgatggcttccccttcaacgtgctgcaggatgtcttcacgctgagccccagcccccaggactggcgtgacacccttttctatggggtcttcacttcccagtggcacaggggaactacagaaggctctgccgtctgtgtcttcacaatgaaggatgtgcagagagtcttcagcggcctctacaaggaggtgaaccgtgagacacagcagtggtacaccgtgacccacccggtgcccacaccccggcctggagcgtgcatcaccaacagtgcccgggaaaggaagatcaactcatccctgcagctcccagaccgcgtgctgaacttcctcaaggaccacttcctgatggacgggcaggtccgaagccgcatgctgctgctgcagccccaggctcgctaccagcgcgtggctgtacaccgcgtccctggcctgcaccacacctacgatgtcctcttcctgggcactggtgacggccggctccacaaggcagtgagcgtgggcccccgggtgcacatcattgaggagctgcagatcttctcatcgggacagcccgtgcagaatctgctcctggacacccacagggggctgctgtatgcggcctcacactcgggcgtagtccaggtgcccatggccaactgcagcctgtacaggagctgtggggactgcctcctcgcccgggacccctactgtgcttggagcggctccagctgcaagcacgtcagcctctaccagcctcagctggccaccaggccgtggatccaggacatcgagggagccagcgccaaggacctttgcagcgcgtcttcggttgtgtccccgtcttttgtaccaacaggggagaagccatgtgagcaagtccagttccagcccaacacagtgaacactttggcctgcccgctcctctccaacctggcgacccgactctggctacgcaacggggcccccgtcaatgcctcggcctcctgccacgtgctacccactggggacctgctgctggtgggcacccaacagctgggggagttccagtgctggtcactagaggagggcttccagcagctggtagccagctactgcccagaggtggtggaggacggggtggcagaccaaacagatgagggtggcagtgtacccgtcattatcagcacatcgcgtgtgagtgcaccagctggtggcaaggccagctggggtgcagacaggtcctactggaaggagttcctggtgatgtgcacgctctttgtgctggccgtgctgctcccagttttattcttgctctaccggcaccggaacagcatgaaagtcttcctgaagcagggggaatgtgccagcgtgcaccccaagacctgccctgtggtgctgccccctgagacccgcccactcaacggcctagggccccctagcaccccgctcgatcaccgagggtaccagtccctgtcagacagccccccggggtcccgagtcttcactgagtcagagaagaggccactcagcatccaagacagcttcgtggaggtatccccagtgtgcccccggccccgggtccgccttggctcggagatccgtgactctgtggtgtgagagctgacttccagaggacgctgccctggcttcaggggctgtgaatgctcggagagggtcaactggacctcccctccgctctgctcttcgtggaacacgaccgtggtgcccggcccttgggagccttggggccagctggcctgctgctctccagtcaagtagcgaagctcctaccacccagacacccaaacagccgtggccccagaggtcctggccaaatatgggggcctgcctaggttggtggaacagtgctccttatgtaaactgagccctttgtttaaaaaacaattccaaatgtgaaactagaatgagagggaagagatagcatggcatgcagcacacacggctgctccagttcatggcctcccaggggtgctggggatgcatccaaagtggttgtctgagacagagttggaaaccctcaccaactggcctcttcaccttccacattatcccgctgccaccggctgccctgtctcactgcagattcaggaccagcttgggctgcgtgcgttctgccttgccagtcagccgaggatgtagttgttgctgccgtcgtcccaccacctcagggaccagagggctaggttggcactgcggccctcaccaggtcctgggctcggacccaactcctggacctttccagcctgtatcaggctgtggccacacgagaggacagcgcgagctcaggagagatttcgtgacaatgtacgcctttccctcagaattcagggaagagactgtcgcctgccttcctccgttgttgcgtgagaacccgtgtgccccttcccaccatatccaccctcgctccatctttgaactcaaacacgaggaactaactgcaccctggtcctctccccagtccccagttcaccctccatccctcaccttcctccactctaagggatatcaacactgcccagcacaggggccctgaatttatgtggtttttatacattttttaataagatgcactttatgtcattttttaataaagtctgaagaattactgtttaa

SEQ ID NO: 7821 - protein, 837 aa, Homo sapiens; identical to SEQ ID NO: 1084

SEQ ID NO: 7822 - DNA, 3783 bp, Homo sapiens
gccgcttgcgggtgagctctgcccaagccgaggctgcggggccggcgccggcgggaggactgcggtgccccgcggaggggctgagtttgccagggcccacttgaccctgtttcccacctcccgccccccaggtccggaggcgggggcccccggggcgactcgggggcggaccgcggggcggagctgccgcccgtgagtccggccgagccacctgagcccgagccgcgggacaccgtcgctcctgctctccgaatgctgcgcaccgcgatgggcctgaggagctggctcgccgccccatggggcgcgctgccgcctcggccaccgctgctgctgctcctgctgctgctgctcctgctgcagccgccgcctccgacctgggcgctcagcccccggatcagcctgcctctgggctctgaagagcggccattcctcagattcgaagctgaacacatctccaactacacagcccttctgctgagcagggatggcaggaccctgtacgtgggtgctcgagaggccctctttgcactcagtagcaacctcagcttcctgccaggcggggagtaccaggagctgctttggggtgcagacgcagagaagaaacagcagtgcagcttcaagggcaaggacccacagcgcgactgtcaaaactacatcaagatcctcctgccgctcagcggcagtcacctgttcacctgtggcacagcagccttcagccccatgtgtacctacatcaacatggagaacttcaccctggcaagggacgagaaggggaatgtcctcctggaagatggcaagggccgttgtcccttcgacccgaatttcaagtccactgccctggtggttgatggcgagctctacactggaacagtcagcagcttccaagggaatgacccggccatctcgcggagccaaagccttcgccccaccaagaccgagagctccctcaactggctgcaagacccagcttttgtggcctcagcctacattcctgagagcctgggcagcttgcaaggcgatgatgacaagatctactttttcttcagcgagactggccaggaatttgagttctttgagaacaccattgtgtcccgcattgcccgcatctgcaagggcgatgagggtggagagcgggtgctacagcagcgctggacctccttcctcaaggcccagctgctgtgctcacggcccgacgatggcttccccttcaacgtgctgcaggatgtcttcacgctgagccccagcccccaggactggcgtgacacccttttctatggggtcttcacttcccagtggcacaggggaactacagaaggctctgccgtctgtgtcttcacaatgaaggatgtgcagagagtcttcagcggcctctacaaggaggtgaaccgtgagacacagcagtggtacaccgtgacccacccggtgcccacaccccggcctggagcgtgcatcaccaacagtgcccgggaaaggaagatcaactcatccctgcagctcccagaccgcgtgctgaacttcctcaaggaccacttcctgatggacgggcaggtccgaagccgcatgctgctgctgcagccccaggctcgctaccagcgcgtggctgtacaccgcgtccctggcctgcaccacacctacgatgtcctcttcctgggcactggtgacggccggctccacaaggcagtgagcgtgggcccccgggtgcacatcattgaggagctgcagatcttctcatcgggacagcccgtgcagaatctgctcctggacacccacagggggctgctgtatgcggcctcacactcgggcgtagtccaggtgcccatggccaactgcagcctgtacaggagctgtggggactgcctcctcgcccgggacccctactgtgcttggagcggctccagctgcaagcacgtcagcctctaccagcctcagctggccaccaggccgtggatccaggacatcgagggagccagcgccaaggacctttgcagcgcgtcttcggttgtgtccccgtcttttgtaccaacaggggagaagccatgtgagcaagtccagttccagcccaacacagtgaacactttggcctgcccgctcctctccaacctggcgacccgactctggctacgcaacggggcccccgtcaatgcctcggcctcctgccacgtgctacccactggggacctgctgctggtgggcacccaacagctgggggagttccagtgctggtcactagaggagggcttccagcagctggtagccagctactgcccagaggtggtggaggacggggtggcagaccaaacagatgagggtggcagtgtacccgtcattatcagcacatcgcgtgtgagtgcaccagctggtggcaaggccagctggggtgcagacaggtcctactggaaggagttcctggtgatgtgcacgctctttgtgctggccgtgctgctcccagttttattcttgctctaccggcaccggaacagcatgaaagtcttcctgaagcagggggaatgtgccagcgtgcaccccaagacctgccctgtggtgctgccccctgagacccgcccactcaacggcctagggccccctagcaccccgctcgatcaccgagggtaccagtccctgtcagacagccccccggggtcccgagtcttcactgagtcagagaagaggccactcagcatccaagacagcttcgtggaggtatccccagtgtgcccccggccccgggtccgccttggctcggagatccgtgactctgtggtgtgagagctgacttccagaggacgctgccctggcttcaggggctgtgaatgctcggagagggtcaactggacctcccctccgctctgctcttcgtggaacacgaccgtggtgcccggcccttgggagccttggggccagctggcctgctgctctccagtcaagtagcgaagctcctaccacccagacacccaaacagccgtggccccagaggtcctggccaaatatgggggcctgcctaggttggtggaacagtgctccttatgtaaactgagccctttgtttaaaaaacaattccaaatgtgaaactagaatgagagggaagagatagcatggcatgcagcacacacggctgctccagttcatggcctcccaggggtgctggggatgcatccaaagtggttgtctgagacagagttggaaaccctcaccaactggcctcttcaccttccacattatcccgctgccaccggctgccctgtctcactgcagattcaggaccagcttgggctgcgtgcgttctgccttgccagtcagccgaggatgtagttgttgctgccgtcgtcccaccacctcagggaccagagggctaggttggcactgcggccctcaccaggtcctgggctcggacccaactcctggacctttccagcctgtatcaggctgtggccacacgagaggacagcgcgagctcaggagagatttcgtgacaatgtacgcctttccctcagaattcagggaagagactgtcgcctgccttcctccgttgttgcgtgagaacccgtgtgccccttcccaccatatccaccctcgctccatctttgaactcaaacacgaggaactaactgcaccctggtcctctccccagtccccagttcaccctccatccctcaccttcctccactctaagggatatcaacactgcccagcacaggggccctgaatttatgtggtttttatacattttttaataagatgcactttatgtcattttttaataaagtctgaagaattactgtttaa

SEQ ID NO: 7823 - protein, 837 aa, Homo sapiens; identical to SEQ ID NO: 1084

SEQ ID NO: 7824 - DNA, 3732 bp, Homo sapiens
ggaaattatggggtatgaccgacaagaagagtcaaggctgactgggtttggggcctcagcgactgaaaagacagaattaatgaaagtggcaagatctcggggggaagcatgtgttttagggaggaccagaaagaagcttggttgcaggtgccagttagataccccatttgaaggtgatgcatgaatctggggttcagggttcagggctgagcagtcctcctgctctgggctgtggcttcatcagctcccagcttggttgggaggggcctgtggcttctgaagaggatgctgctggggaatagtacaactcaaaggggtaggattctgtgccctcacccctaggccgaaggaaagtttgccagtcacaaaactagctgagcccctgggctccctgcagcacacacactctgtgcacgctccactgtgccccagaaaacccgtgggttctttgttcctagacttgagtgccccatccccagtcctgggagcagaggccgggcctgggtgtggaagggggggctcggcggtgccccctggtggcatgcttgggcgtgggactgatatcccctcgctccttccccccagcgcgactgtcaaaactacatcaagatcctcctgccgctcagcggcagtcacctgttcacctgtggcacagcagccttcagccccatgtgtacctacatcaacatggagaacttcaccctggcaagggacgagaaggggaatgtcctcctggaagatggcaagggccgttgtcccttcgacccgaatttcaagtccactgccctggtggttgatggcgagctctacactggaacagtcagcagcttccaagggaatgacccggccatctcgcggagccaaagccttcgccccaccaagaccgagagctccctcaactggctgcaagacccagcttttgtggcctcagcctacattcctgagagcctgggcagcttgcaaggcgatgatgacaagatctactttttcttcagcgagactggccaggaatttgagttctttgagaacaccattgtgtcccgcattgcccgcatctgcaagggcgatgagggtggagagcgggtgctacagcagcgctggacctccttcctcaaggcccagctgctgtgctcacggcccgacgatggcttccccttcaacgtgctgcaggatgtcttcacgctgagccccagcccccaggactggcgtgacacccttttctatggggtcttcacttcccagtggcacaggggaactacagaaggctctgccgtctgtgtcttcacaatgaaggatgtgcagagagtcttcagcggcctctacaaggaggtgaaccgtgagacacagcagtggtacaccgtgacccacccggtgcccacaccccggcctggagcgtgcatcaccaacagtgcccgggaaaggaagatcaactcatccctgcagctcccagaccgcgtgctgaacttcctcaaggaccacttcctgatggacgggcaggtccgaagccgcatgctgctgctgcagccccaggctcgctaccagcgcgtggctgtacaccgcgtccctggcctgcaccacacctacgatgtcctcttcctgggcactggtgacggccggctccacaaggcagtgagcgtgggcccccgggtgcacatcattgaggagctgcagatcttctcatcgggacagcccgtgcagaatctgctcctggacacccacagggggctgctgtatgcggcctcacactcgggcgtagtccaggtgcccatggccaactgcagcctgtacaggagctgtggggactgcctcctcgcccgggacccctactgtgcttggagcggctccagctgcaagcacgtcagcctctaccagcctcagctggccaccaggccgtggatccaggacatcgagggagccagcgccaaggacctttgcagcgcgtcttcggttgtgtccccgtcttttgtaccaacaggggagaagccatgtgagcaagtccagttccagcccaacacagtgaacactttggcctgcccgctcctctccaacctggcgacccgactctggctacgcaacggggcccccgtcaatgcctcggcctcctgccacgtgctacccactggggacctgctgctggtgggcacccaacagctgggggagttccagtgctggtcactagaggagggcttccagcagctggtagccagctactgcccagaggtggtggaggacggggtggcagaccaaacagatgagggtggcagtgtacccgtcattatcagcacatcgcgtgtgagtgcaccagctggtggcaaggccagctggggtgcagacaggtcctactggaaggagttcctggtgatgtgcacgctctttgtgctggccgtgctgctcccagttttattcttgctctaccggcaccggaacagcatgaaagtcttcctgaagcagggggaatgtgccagcgtgcaccccaagacctgccctgtggtgctgccccctgagacccgcccactcaacggcctagggccccctagcaccccgctcgatcaccgagggtaccagtccctgtcagacagccccccggggtcccgagtcttcactgagtcagagaagaggccactcagcatccaagacagcttcgtggaggtatccccagtgtgcccccggccccgggtccgccttggctcggagatccgtgactctgtggtgtgagagctgacttccagaggacgctgccctggcttcaggggctgtgaatgctcggagagggtcaactggacctcccctccgctctgctcttcgtggaacacgaccgtggtgcccggcccttgggagccttggggccagctggcctgctgctctccagtcaagtagcgaagctcctaccacccagacacccaaacagccgtggccccagaggtcctggccaaatatgggggcctgcctaggttggtggaacagtgctccttatgtaaactgagccctttgtttaaaaaacaattccaaatgtgaaactagaatgagagggaagagatagcatggcatgcagcacacacggctgctccagttcatggcctcccaggggtgctggggatgcatccaaagtggttgtctgagacagagttggaaaccctcaccaactggcctcttcaccttccacattatcccgctgccaccggctgccctgtctcactgcagattcaggaccagcttgggctgcgtgcgttctgccttgccagtcagccgaggatgtagttgttgctgccgtcgtcccaccacctcagggaccagagggctaggttggcactgcggccctcaccaggtcctgggctcggacccaactcctggacctttccagcctgtatcaggctgtggccacacgagaggacagcgcgagctcaggagagatttcgtgacaatgtacgcctttccctcagaattcagggaagagactgtcgcctgccttcctccgttgttgcgtgagaacccgtgtgccccttcccaccatatccaccctcgctccatctttgaactcaaacacgaggaactaactgcaccctggtcctctccccagtccccagttcaccctccatccctcaccttcctccactctaagggatatcaacactgcccagcacaggggccctgaatttatgtggtttttatacattttttaataagatgcactttatgtcattttttaataaagtctgaagaattactgtttaa

SEQ ID NO: 7825 - protein, 681 aa, Homo sapiens
MCTYINMENFTLARDEKGNVLLEDGKGRCPFDPNFKSTALVVDGELYTGTVSSFQGNDPAISRSQSLRPTKTESSLNWLQDPAFVASAYIPESLGSLQGDDDKIYFFFSETGQEFEFFENTIVSRIARICKGDEGGERVLQQRWTSFLKAQLLCSRPDDGFPFNVLQDVFTLSPSPQDWRDTLFYGVFTSQWHRGTTEGSAVCVFTMKDVQRVFSGLYKEVNRETQQWYTVTHPVPTPRPGACITNSARERKINSSLQLPDRVLNFLKDHFLMDGQVRSRMLLLQPQARYQRVAVHRVPGLHHTYDVLFLGTGDGRLHKAVSVGPRVHIIEELQIFSSGQPVQNLLLDTHRGLLYAASHSGVVQVPMANCSLYRSCGDCLLARDPYCAWSGSSCKHVSLYQPQLATRPWIQDIEGASAKDLCSASSVVSPSFVPTGEKPCEQVQFQPNTVNTLACPLLSNLATRLWLRNGAPVNASASCHVLPTGDLLLVGTQQLGEFQCWSLEEGFQQLVASYCPEVVEDGVADQTDEGGSVPVIISTSRVSAPAGGKASWGADRSYWKEFLVMCTLFVLAVLLPVLFLLYRHRNSMKVFLKQGECASVHPKTCPVVLPPETRPLNGLGPPSTPLDHRGYQSLSDSPPGSRVFTESEKRPLSIQDSFVEVSPVCPRPRVRLGSEIRDSVV

SEQ ID NO: 7826 - DNA, 2166 bp, Homo sapiens
gataaaggatccagtcatgaactattagaaagtggggtcgcctgttacgtaacaggcctcttgggggtggctctgggaggcatacaagccgggtggccatgggtgatggccctggctgcccatgcccgcttctcatccccgtgtctggctgtgcaggggctgctgtatgcggcctcacactcgggcgtagtccaggtgcccatggccaactgcagcctgtacaggagctgtggggactgcctcctcgcccgggacccctactgtgcttggagcggctccagctgcaagcacgtcagcctctaccagcctcagctggccaccaggccgtggatccaggacatcgagggagccagcgccaaggacctttgcagcgcgtcttcggttgtgtccccgtcttttgtaccaacaggggagaagccatgtgagcaagtccagttccagcccaacacagtgaacactttggcctgcccgctcctctccaacctggcgacccgactctggctacgcaacggggcccccgtcaatgcctcggcctcctgccacgtgctacccactggggacctgctgctggtgggcacccaacagctgggggagttccagtgctggtcactagaggagggcttccagcagctggtagccagctactgcccagaggtggtggaggacggggtggcagaccaaacagatgagggtggcagtgtacccgtcattatcagcacatcgcgtgtgagtgcaccagctggtggcaaggccagctggggtgcagacaggtcctactggaaggagttcctggtgatgtgcacgctctttgtgctggccgtgctgctcccagttttattcttgctctaccggcaccggaacagcatgaaagtcttcctgaagcagggggaatgtgccagcgtgcaccccaagacctgccctgtggtgctgccccctgagacccgcccactcaacggcctagggccccctagcaccccgctcgatcaccgagggtaccagtccctgtcagacagccccccggggtcccgagtcttcactgagtcagagaagaggccactcagcatccaagacagcttcgtggaggtatccccagtgtgcccccggccccgggtccgccttggctcggagatccgtgactctgtggtgtgagagctgacttccagaggacgctgccctggcttcaggggctgtgaatgctcggagagggtcaactggacctcccctccgctctgctcttcgtggaacacgaccgtggtgcccggcccttgggagccttggggccagctggcctgctgctctccagtcaagtagcgaagctcctaccacccagacacccaaacagccgtggccccagaggtcctggccaaatatgggggcctgcctaggttggtggaacagtgctccttatgtaaactgagccctttgtttaaaaaacaattccaaatgtgaaactagaatgagagggaagagatagcatggcatgcagcacacacggctgctccagttcatggcctcccaggggtgctggggatgcatccaaagtggttgtctgagacagagttggaaaccctcaccaactggcctcttcaccttccacattatcccgctgccaccggctgccctgtctcactgcagattcaggaccagcttgggctgcgtgcgttctgccttgccagtcagccgaggatgtagttgttgctgccgtcgtcccaccacctcagggaccagagggctaggttggcactgcggccctcaccaggtcctgggctcggacccaactcctggacctttccagcctgtatcaggctgtggccacacgagaggacagcgcgagctcaggagagatttcgtgacaatgtacgcctttccctcagaattcagggaagagactgtcgcctgccttcctccgttgttgcgtgagaacccgtgtgccccttcccaccatatccaccctcgctccatctttgaactcaaacacgaggaactaactgcaccctggtcctctccccagtccccagttcaccctccatccctcaccttcctccactctaagggatatcaacactgcccagcacaggggccctgaatttatgtggtttttatacattttttaataagatgcactttatgtcattttttaataaagtctgaagaattactgtttaa

SEQ ID NO: 7827 - protein, 347 aa, Homo sapiens
MALAAHARFSSPCLAVQGLLYAASHSGVVQVPMANCSLYRSCGDCLLARDPYCAWSGSSCKHVSLYQPQLATRPWIQDIEGASAKDLCSASSVVSPSFVPTGEKPCEQVQFQPNTVNTLACPLLSNLATRLWLRNGAPVNASASCHVLPTGDLLLVGTQQLGEFQCWSLEEGFQQLVASYCPEVVEDGVADQTDEGGSVPVIISTSRVSAPAGGKASWGADRSYWKEFLVMCTLFVLAVLLPVLFLLYRHRNSMKVFLKQGECASVHPKTCPVVLPPETRPLNGLGPPSTPLDHRGYQSLSDSPPGSRVFTESEKRPLSIQDSFVEVSPVCPRPRVRLGSEIRDSVV

SEQ ID NO: 7828 - DNA, 2573 bp, Homo sapiens
gttttcatccttcgtgcctggttgacttatctgtctcctgagtgtatccagaattactgtcctttattttttattacacagatgtatgcatgtgcactgtttaaaaaaaaagatgagaacacatcaaaaaaaattttaattaaaaaaaagaaaaagagagatctatacatacagatcccagctgtccttctaatctttttctgagggtacatactattttttattattattttttgagacagggtctctctgtgttgctcaggctggagtgtagtggtgtgattacagctcactgcagccttggcctcctgggctcaagcaatcgatcctccaacctcagcctcctgagcaggtggaaccacaggcgtgcgccaccatgcctggctaatttttctattttttgtagagatggggtctcgctatgttgcccaggttgtcttgaattcctgggctcaagcgatctaccggccttggcctcccaaagtgctgggattacaggcgtgggccaccatgcctggccactgagggtacatactgtttatgtaattaagggaagtgttatcttagctttgacttgaaataatgtgtagacagaggagatgctgactcctgtgggtggggaatcagctcaggaaaggcccttgcccaggcccaagtctgcagtgaggggtgagggaatgtgagctcaggggacttcctggccaatcccagaattctctctggccctcaggccgtggatccaggacatcgagggagccagcgccaaggacctttgcagcgcgtcttcggttgtgtccccgtcttttgtaccaacaggggagaagccatgtgagcaagtccagttccagcccaacacagtgaacactttggcctgcccgctcctctccaacctggcgacccgactctggctacgcaacggggcccccgtcaatgcctcggcctcctgccacgtgctacccactggggacctgctgctggtgggcacccaacagctgggggagttccagtgctggtcactagaggagggcttccagcagctggtagccagctactgcccagaggtggtggaggacggggtggcagaccaaacagatgagggtggcagtgtacccgtcattatcagcacatcgcgtgtgagtgcaccagctggtggcaaggccagctggggtgcagacaggtcctactggaaggagttcctggtgatgtgcacgctctttgtgctggccgtgctgctcccagttttattcttgctctaccggcaccggaacagcatgaaagtcttcctgaagcagggggaatgtgccagcgtgcaccccaagacctgccctgtggtgctgccccctgagacccgcccactcaacggcctagggccccctagcaccccgctcgatcaccgagggtaccagtccctgtcagacagccccccggggtcccgagtcttcactgagtcagagaagaggccactcagcatccaagacagcttcgtggaggtatccccagtgtgcccccggccccgggtccgccttggctcggagatccgtgactctgtggtgtgagagctgacttccagaggacgctgccctggcttcaggggctgtgaatgctcggagagggtcaactggacctcccctccgctctgctcttcgtggaacacgaccgtggtgcccggcccttgggagccttggggccagctggcctgctgctctccagtcaagtagcgaagctcctaccacccagacacccaaacagccgtggccccagaggtcctggccaaatatgggggcctgcctaggttggtggaacagtgctccttatgtaaactgagccctttgtttaaaaaacaattccaaatgtgaaactagaatgagagggaagagatagcatggcatgcagcacacacggctgctccagttcatggcctcccaggggtgctggggatgcatccaaagtggttgtctgagacagagttggaaaccctcaccaactggcctcttcaccttccacattatcccgctgccaccggctgccctgtctcactgcagattcaggaccagcttgggctgcgtgcgttctgccttgccagtcagccgaggatgtagttgttgctgccgtcgtcccaccacctcagggaccagagggctaggttggcactgcggccctcaccaggtcctgggctcggacccaactcctggacctttccagcctgtatcaggctgtggccacacgagaggacagcgcgagctcaggagagatttcgtgacaatgtacgcctttccctcagaattcagggaagagactgtcgcctgccttcctccgttgttgcgtgagaacccgtgtgccccttcccaccatatccaccctcgctccatctttgaactcaaacacgaggaactaactgcaccctggtcctctccccagtccccagttcaccctccatccctcaccttcctccactctaagggatatcaacactgcccagcacaggggccctgaatttatgtggtttttatacattttttaataagatgcactttatgtcattttttaataaagtctgaagaattactgtttaa

SEQ ID NO: 7829 - protein, 201 aa, Homo sapiens [sequence omitted]

SEQ ID NO: 7830 - DNA, 1074 bp, Homo sapiens
cccacgaggctgagctcgctggtgctggtcctgtgacctgctctctcaagtttctggtaggctttaatgagcgtgtgacctgggccacgtcctgtggcgtttgttctcctaggccaaccccttcaaggagcgaatctgcagggtcttctccacatccccagccaaagacagccttagctttgaggacttcctggatctcctcagtgtgttcagtgacacagccacgccagacatcaagtcccattatgccttccgcatctttgactttgatgatgacggaaccttgaacagagaagacctgagccggctggtgaactgcctcacgggagagggcgaggacacacggcttagtgcgtctgagatgaagcagctcatcgacaacgtgagcagctgagcaggcctgggagcgggagggagcagttggggctctggcctgaaactctccctttcccagatcctggaggagtctgacattgacagggatggaaccatcaacctctctgagttccagcacgtcatctcccgttctccagactttgccagctcctttaagattgtcctgtgacagcagccccagcgtgtgtcctggcaccctgtccaagaacctttctactgctgagctgtggccaaggtcaagcctgtgttgccagtgcgggccaagctggcccagcctggagctggcgctgtgcagcctcaccccgggcaggggcggccctcgttgtcagggcctctcctcactgctgttgtcattgctccgtttgtgtttgtactaatcagtaataaaggtttagaagtttgaccctatgtgtgacatgagatacactggtatgaggaaggactggacttctcttctaagagccttcaatcatcctaggaataagcagcatatcgagcagaggccagcgggaagtcaagccgcacccacgctggctgtccccgtgggagggtgtgaggatgaaggggcagcaggaggtgtgggactcgcctgtatcctgattggggtggtggttagatgagtctctgcatgcatcaaaatgtaaagaaccgtacatcagtaaagtctattttactgca

SEQ ID NO: 7831 - protein, 96 aa, Homo sapiens
MEPSTSLSSSTSSPVLQTLPAPLRLSCDSSPSVCPGTLSKNLSTAELWPRSSLCCQCGPSWPSLELALCSLTPGRGGPRCQGLSSLLLSLLRLCLY

SEQ ID NO: 7832 - DNA, 995 bp, Homo sapiens
gatgacttcttcttccctctctgcccacacttacgttgtatgtgacctgcctttgggttaaacacttgactcccaggaagccatctcagtcccttccccagctgggccaaccccttcaaggagcgaatctgcagggtcttctccacatccccagccaaagacagccttagctttgaggacttcctggatctcctcagtgtgttcagtgacacagccacgccagacatcaagtcccattatgccttccgcatctttgactttgatgatgacggaaccttgaacagagaagacctgagccggctggtgaactgcctcacgggagagggcgaggacacacggcttagtgcgtctgagatgaagcagctcatcgacaacatcctggaggagtctgacattgacagggatggaaccatcaacctctctgagttccagcacgtcatctcccgttctccagactttgccagctcctttaagattgtcctgtgacagcagccccagcgtgtgtcctggcaccctgtccaagaacctttctactgctgagctgtggccaaggtcaagcctgtgttgccagtgcgggccaagctggcccagcctggagctggcgctgtgcagcctcaccccgggcaggggcggccctcgttgtcagggcctctcctcactgctgttgtcattgctccgtttgtgtttgtactaatcagtaataaaggtttagaagtttgaccctatgtgtgacatgagatacactggtatgaggaaggactggacttctcttctaagagccttcaatcatcctaggaataagcagcatatcgagcagaggccagcgggaagtcaagccgcacccacgctggctgtccccgtgggagggtgtgaggatgaaggggcagcaggaggtgtgggactcgcctgtatcctgattggggtggtggttagatgagtctctgcatgcatcaaaatgtaaagaaccgtacatcagtaaagtctattttactgca

SEQ ID NO: 7833 - protein, 96 aa, Homo sapiens; identical to SEQ ID NO: 7831

SEQ ID NO: 7834 - DNA, 1173 bp, Homo sapiens
aggatgacttcttcttccctctctgcccacacttacgttgtatgtgacctgcctttgggttaaacacttgactcccaggaagccatctcagtcccttccccagctgggtcagtttgctttcctgtgcccccactgccctccatgttggccccaaagcactgactgttcacccccacgaggctgagctcgctggtgctggtcctgtgacctgctctctcaagtttctggtaggctttaatgagcgtgtgacctgggccacgtcctgtggcgtttgttctcctaggccaaccccttcaaggagcgaatctgcagggtcttctccacatccccagccaaagacagccttagctttgaggacttcctggatctcctcagtgtgttcagtgacacagccacgccagacatcaagtcccattatgccttccgcatctttgactttgatgatgacggaaccttgaacagagaagacctgagccggctggtgaactgcctcacgggagagggcgaggacacacggcttagtgcgtctgagatgaagcagctcatcgacaacatcctggaggagtctgacattgacagggatggaaccatcaacctctctgagttccagcacgtcatctcccgttctccagactttgccagctcctttaagattgtcctgtgacagcagccccagcgtgtgtcctggcaccctgtccaagaacctttctactgctgagctgtggccaaggtcaagcctgtgttgccagtgcgggccaagctggcccagcctggagctggcgctgtgcagcctcaccccgggcaggggcggccctcgttgtcagggcctctcctcactgctgttgtcattgctccgtttgtgtttgtactaatcagtaataaaggtttagaagtttgaccctatgtgtgacatgagatacactggtatgaggaaggactggacttctcttctaagagccttcaatcatcctaggaataagcagcatatcgagcagaggccagcgggaagtcaagccgcacccacgctggctgtccccgtgggagggtgtgaggatgaaggggcagcaggaggtgtgggactcgcctgtatcctgattggggtggtggttagatgagtctctgcatgcatcaaaatgtaaagaaccgtacatcagtaaagtctattttactgca

SEQ ID NO: 7835 - protein, 96 aa, Homo sapiens; identical to SEQ ID NO: 7831

SEQ ID NO: 7836 - DNA, 1210 bp, Homo sapiens
ccgccaccatgcccggctaatttttgtatttttagtagagaaggggttcaccatgttgctcagactggtctcagacgcctgacctccaaagctccgcccgccttggcctcccaaagtgctgggattacaggtgtgagccaccgtgcctggccaattctttagggccaacttctggctcctttcccaacttcttcatcccttggggatctctagaatcagtgccaagcacatagtaaatgctcagtaaatactcattgcaagaatagactcctaggctgtactgccttgtgacatgtccttttgcttaccgttgcctgatgactcggaagttctgtgtacgtggttttagctcctcacctggttgacaatgagcagcaggcaaggagtgggaatgaacacacagggagaccgatcgctgagaacaccgacagttcccctctctctaccagagcccacaggcggttttgtgagctgcttccccaggagcagcggagcgtggagtcgtcacttcgggcacaagtgcccttcgagcagattctcagccttccagagctcaaggccaaccccttcaaggacagctcatcgacaacatcctggaggagtctgacattgacagggatggaaccatcaacctctctgagttccagcacgtcatctcccgttctccagactttgccagctcctttaagattgtcctgtgacagcagccccagcgtgtgtcctggcaccctgtccaagaacctttctactgctgagctgtggccaaggtcaagcctgtgttgccagtgcgggccaagctggcccagcctggagctggcgctgtgcagcctcaccccgggcaggggcggccctcgttgtcagggcctctcctcactgctgttgtcattgctccgtttgtgtttgtactaatcagtaataaaggtttagaagtttgaccctatgtgtgacatgagatacactggtatgaggaaggactggacttctcttctaagagccttcaatcatcctaggaataagcagcatatcgagcagaggccagcgggaagtcaagccgcacccacgctggctgtccccgtgggagggtgtgaggatgaaggggcagcaggaggtgtgggactcgcctgtatcctgattggggtggtggttagatgagtctctgcatgcatcaaaatgtaaagaaccgtacatcagtaaagtctattttactgca

SEQ ID NO: 7837 - protein, 96 aa, Homo sapiens; identical to SEQ ID NO: 7831

SEQ ID NO: 7838 - DNA, 979 bp, Homo sapiens
gcgatggggggctcgggcagtcgcctgtccaaggagctgctggccgagtaccaggacttgacgttcctgacgaagcaggagatcctcctgccaaccccttcaaggagcgaatctgcagggtcttctccacatccccagccaaagacagccttagctttgaggacttcctggatctcctcagtgtgttcagtgacacagccacgccagacatcaagtcccattatgccttccgcatctttgactttgatgatgacggaaccttgaacagagaagacctgagccggctggtgaactgcctcacgggagagggcgaggacacacggcttagtgcgtctgagatgaagcagctcatcgacaacatcctggaggagtctgacattgacagggatggaaccatcaacctctctgagttccagcacgtcatctcccgttctccagactttgccagctcctttaagattgtcctgtgacagcagccccagcgtgtgtcctggcaccctgtccaagaacctttctactgctgagctgtggccaaggtcaagcctgtgttgccagtgcgggccaagctggcccagcctggagctggcgctgtgcagcctcaccccgggcaggggcggccctcgttgtcagggcctctcctcactgctgttgtcattgctccgtttgtgtttgtactaatcagtaataaaggtttagaagtttgaccctatgtgtgacatgagatacactggtatgaggaaggactggacttctcttctaagagccttcaatcatcctaggaataagcagcatatcgagcagaggccagcgggaagtcaagccgcacccacgctggctgtccccgtgggagggtgtgaggatgaaggggcagcaggaggtgtgggactcgcctgtatcctgattggggtggtggttagatgagtctctgcatgcatcaaaatgtaaagaaccgtacatcagtaaagtctattttactgca

SEQ ID NO: 7839 - protein, 96 aa, Homo sapiens; identical to SEQ ID NO: 7831

SEQ ID NO: 7840 - DNA, 1249 bp, Homo sapiens
tgcgtctcgaggcgagttggcggagctgtgcgcgcggcggggcgatggggggctcgggcagtcgcctgtccaaggagctgctggccgagtaccaggacttgacgttcctgacgaagcaggagatcctcctttctgtgtacgtggttttagctcctcacctggttgacaatgagcagcaggcaaggagtgggaatgaacacacagggagaccgatcgctgagaacaccgacagttcccctctctctaccagagcccacaggcggttttgtgagctgcttccccaggagcagcggagcgtggagtcgtcacttcgggcacaagtgcccttcgagcagattctcagccttccagagctcaaggccaaccccttcaaggagcgaatctgcagggtcttctccacatccccagccaaagacagccttagctttgaggacttcctggatctcctcagtgtgttcagtgacacagccacgccagacatcaagtcccattatgccttccgcatctttgactttgatgatgacggaaccttgaacagagaagacctgagccggctggtgaactgcctcacgggagagggcgaggacacacggcttagtgcgtctgagatgaagcagctcatcgacaacatcctggaggagtctgacattgacagggatggaaccatcaacctctctgagttccagcacgtcatctcccgttctccagactttgccagctcctttaagattgtcctgtgacagcagccccagcgtgtgtcctggcaccctgtccaagaacctttctactgctgagctgtggccaaggtcaagcctgtgttgccagtgcgggccaagctggcccagcctggagctggcgctgtgcagcctcaccccgggcaggggcggccctcgttgtcagggcctctcctcactgctgttgtcattgctccgtttgtgtttgtactaatcagtaataaaggtttagaagtttgaccctatgtgtgacatgagatacactggtatgaggaaggactggacttctcttctaagagccttcaatcatcctaggaataagcagcatatcgagcagaggccagcgggaagtcaagccgcacccacgctggctgtccccgtgggagggtgtgaggatgaaggggcagcaggaggtgtgggactcgcctgtatcctgattggggtggtggttagatgagtctctgcatgcatcaaaatgtaaagaaccgtacatcagtaaagtctattttactgca

SEQ ID NO: 7841 - protein, 231 aa, Homo sapiens
MGGSGSRLSKELLAEYQDLTFLTKQEILLSVYVVLAPHLVDNEQQARSGNEHTGRPIAENTDSSPLSTRAHRRFCELLPQEQRSVESSLRAQVPFEQILSLPELKANPFKERICRVFSTSPAKDSLSFEDFLDLLSVFSDTATPDIKSHYAFRIFDFDDDGTLNREDLSRLVNCLTGEGEDTRLSASEMKQLIDNILEESDIDRDGTINLSEFQHVISRSPDFASSFKIVL

SEQ ID NO: 7842 - DNA, 1242 bp, Homo sapiens
ggaacgcctggcagcttttaggagggggcgggcccgggggtggtggccccaggagcggttgccgcggggaccgggcagtgacgcggcccaagggcggaagtgagaaagttgtctgcgtctcgaggcgagttggcggagctgtgcgcgcggcggggcgatggggggctcgggcagtcgcctgtccaaggagctgctggccgagtaccaggacttgacgttcctgacgaagcaggagatcctcctagcccacaggcggttttgtgagctgcttccccaggagcagcggagcgtggagtcgtcacttcgggcacaagtgcccttcgagcagattctcagccttccagagctcaaggccaaccccttcaaggagcgaatctgcagggtcttctccacatccccagccaaagacagccttagctttgaggacttcctggatctcctcagtgtgttcagtgacacagccacgccagacatcaagtcccattatgccttccgcatctttgactttgatgatgacggaaccttgaacagagaagacctgagccggctggtgaactgcctcacgggagagggcgaggacacacggcttagtgcgtctgagatgaagcagctcatcgacaacatcctggaggagtctgacattgacagggatggaaccatcaacctctctgagttccagcacgtcatctcccgttctccagactttgccagctcctttaagattgtcctgtgacagcagccccagcgtgtgtcctggcaccctgtccaagaacctttctactgctgagctgtggccaaggtcaagcctgtgttgccagtgcgggccaagctggcccagcctggagctggcgctgtgcagcctcaccccgggcaggggcggccctcgttgtcagggcctctcctcactgctgttgtcattgctccgtttgtgtttgtactaatcagtaataaaggtttagaagtttgaccctatgtgtgacatgagatacactggtatgaggaaggactggacttctcttctaagagccttcaatcatcctaggaataagcagcatatcgagcagaggccagcgggaagtcaagccgcacccacgctggctgtccccgtgggagggtgtgaggatgaaggggcagcaggaggtgtgggactcgcctgtatcctgattggggtggtggttagatgagtctctgcatgcatcaaaatgtaaagaaccgtacatcagtaaagtctattttactgca

SEQ ID NO: 7843 - protein, 191 aa, Homo sapiens
MGGSGSRLSKELLAEYQDLTFLTKQEILLAHRRFCELLPQEQRSVESSLRAQVPFEQILSLPELKANPFKERICRVFSTSPAKDSLSFEDFLDLLSVFSDTATPDIKSHYAFRIFDFDDDGTLNREDLSRLVNCLTGEGEDTRLSASEMKQLIDNILEESDIDRDGTINLSEFQHVISRSPDFASSFKIVL

SEQ ID NO: 7844 - DNA, 1271 bp, Homo sapiens
gcggggccgtgagtcccgggctccgccccggagcgtcgggcccctccccgggccccgcctccagctcgcctaggaccgcttggagccggcagctcgcctgccaaacccggctgggaacgcctggcagcttttaggagggggcgggcccgggggtggtggccccaggagcggttgccgcggggaccgggcagtgacgcggcccaagggcggaagtgagaaagttgtctgcgtctcgaggacttgacgttcctgacgaagcaggagatcctcctagcccacaggcggttttgtgagctgcttccccaggagcagcggagcgtggagtcgtcacttcgggcacaagtgcccttcgagcagattctcagccttccagagctcaaggccaaccccttcaaggagcgaatctgcagggtcttctccacatccccagccaaagacagccttagctttgaggacttcctggatctcctcagtgtgttcagtgacacagccacgccagacatcaagtcccattatgccttccgcatctttgactttgatgatgacggaaccttgaacagagaagacctgagccggctggtgaactgcctcacgggagagggcgaggacacacggcttagtgcgtctgagatgaagcagctcatcgacaacatcctggaggagtctgacattgacagggatggaaccatcaacctctctgagttccagcacgtcatctcccgttctccagactttgccagctcctttaagattgtcctgtgacagcagccccagcgtgtgtcctggcaccctgtccaagaacctttctactgctgagctgtggccaaggtcaagcctgtgttgccagtgcgggccaagctggcccagcctggagctggcgctgtgcagcctcaccccgggcaggggcggccctcgttgtcagggcctctcctcactgctgttgtcattgctccgtttgtgtttgtactaatcagtaataaaggtttagaagtttgaccctatgtgtgacatgagatacactggtatgaggaaggactggacttctcttctaagagccttcaatcatcctaggaataagcagcatatcgagcagaggccagcgggaagtcaagccgcacccacgctggctgtccccgtgggagggtgtgaggatgaaggggcagcaggaggtgtgggactcgcctgtatcctgattggggtggtggttagatgagtctctgcatgcatcaaaatgtaaagaaccgtacatcagtaaagtctattttactgca

SEQ ID NO: 7845 - protein, 96 aa, Homo sapiens; identical to SEQ ID NO: 7831

SEQ ID NO: 7846 - DNA, 1469 bp, Homo sapiens
aactctctaaactgatgatgaaatacgtcactaatgaagggaccagtggtcccaggggagctgaacacctgacgctgcgcccctaacaacgggtaagaagaaacaagggccgctgcgcaagcagcggcaggacacccggcgccaagggggcgcggcctggagcgccggggcacgaggccctgcttcaagctgagggcccggggagaagccggtacctctccacctcctgcagctcccgttcctccggctcccagtcggaatcggggtccggctcccggccaatagggcctgggcccgccaccccccgggtcgcgaacccacagcgagtgacggcggcgcaaacgcgcccgcccagcaagagactcagggtaaccgccatgtcgacgcaaaccagccttcagcagtcggctacgaaacagcagcggaagtagccgggacttgacgttcctgacgaagcaggagatcctcctagcccacaggcggttttgtgagctgcttccccaggagcagcggagcgtggagtcgtcacttcgggcacaagtgcccttcgagcagattctcagccttccagagctcaaggccaaccccttcaaggagcgaatctgcagggtcttctccacatccccagccaaagacagccttagctttgaggacttcctggatctcctcagtgtgttcagtgacacagccacgccagacatcaagtcccattatgccttccgcatctttgactttgatgatgacggaaccttgaacagagaagacctgagccggctggtgaactgcctcacgggagagggcgaggacacacggcttagtgcgtctgagatgaagcagctcatcgacaacatcctggaggagtctgacattgacagggatggaaccatcaacctctctgagttccagcacgtcatctcccgttctccagactttgccagctcctttaagattgtcctgtgacagcagccccagcgtgtgtcctggcaccctgtccaagaacctttctactgctgagctgtggccaaggtcaagcctgtgttgccagtgcgggccaagctggcccagcctggagctggcgctgtgcagcctcaccccgggcaggggcggccctcgttgtcagggcctctcctcactgctgttgtcattgctccgtttgtgtttgtactaatcagtaataaaggtttagaagtttgaccctatgtgtgacatgagatacactggtatgaggaaggactggacttctcttctaagagccttcaatcatcctaggaataagcagcatatcgagcagaggccagcgggaagtcaagccgcacccacgctggctgtccccgtgggagggtgtgaggatgaaggggcagcaggaggtgtgggactcgcctgtatcctgattggggtggtggttagatgagtctctgcatgcatcaaaatgtaaagaaccgtacatcagtaaagtctattttactgca

SEQ ID NO: 7847 - protein, 96 aa, Homo sapiens; identical to SEQ ID NO: 7831

SEQ ID NO: 7848 - DNA, 803 bp, Homo sapiens
cccacgaggctgagctcgctggtgctggtcctgtgacctgctctctcaagtttctggtaggctttaatgagcgtgtgacctgggccacgtcctgtggcgtttgttctcctaggccaaccccttcaaggagcgaatctgcagggtcttctccacatccccagccaaagacagccttagctttgaggacttcctggatctcctcagtgtgttcagtgacacagccacgccagacatcaagtcccattatgccttccgcatctttgactttgatgatgacggaaccttgaacagagaagacctgagccggctggtgaactgcctcacgggagagggcgaggacacacggcttagtgcgtctgagatgaagcagctcatcgacaacgtgagcagctgagcaggcctgggagcgggagggagcagttggggctctggcctgaaactctccctttcccagatcctggaggagtctgacattgacagggatggaaccatcaacctctctgagttccagcacgtcatctcccgttctccagactttgccagctcctttaagattgtcctgtgacagcagccccagcgtgtgtcctggcaccctgtccaagaacctttctactgctgagctgtggccaaggtcaagcctgtgttgccagtgcgggccaagctggcccagcctggagctggcgctgtgcagcctcaccccgggcaggggcggccctcgttgtcagggcctctcctcactgctgttgtcattgctccgtttgtgtttgtactaatcagtaataaaggtttagaagtttgaccct

SEQ ID NO: 7849 - protein, 96 aa, Homo sapiens; identical to SEQ ID NO: 7831

SEQ ID NO: 7850 - DNA, 724 bp, Homo sapiens
gatgacttcttcttccctctctgcccacacttacgttgtatgtgacctgcctttgggttaaacacttgactcccaggaagccatctcagtcccttccccagctgggccaaccccttcaaggagcgaatctgcagggtcttctccacatccccagccaaagacagccttagctttgaggacttcctggatctcctcagtgtgttcagtgacacagccacgccagacatcaagtcccattatgccttccgcatctttgactttgatgatgacggaaccttgaacagagaagacctgagccggctggtgaactgcctcacgggagagggcgaggacacacggcttagtgcgtctgagatgaagcagctcatcgacaacatcctggaggagtctgacattgacagggatggaaccatcaacctctctgagttccagcacgtcatctcccgttctccagactttgccagctcctttaagattgtcctgtgacagcagccccagcgtgtgtcctggcaccctgtccaagaacctttctactgctgagctgtggccaaggtcaagcctgtgttgccagtgcgggccaagctggcccagcctggagctggcgctgtgcagcctcaccccgggcaggggcggccctcgttgtcagggcctctcctcactgctgttgtcattgctccgtttgtgtttgtactaatcagtaataaaggtttagaagtttgaccct

SEQ ID NO: 7851 - protein, 96 aa, Homo sapiens; identical to SEQ ID NO: 7831

SEQ ID NO: 7852 - DNA, 902 bp, Homo sapiens
aggatgacttcttcttccctctctgcccacacttacgttgtatgtgacctgcctttgggttaaacacttgactcccaggaagccatctcagtcccttccccagctgggtcagtttgctttcctgtgcccccactgccctccatgttggccccaaagcactgactgttcacccccacgaggctgagctcgctggtgctggtcctgtgacctgctctctcaagtttctggtaggctttaatgagcgtgtgacctgggccacgtcctgtggcgtttgttctcctaggccaaccccttcaaggagcgaatctgcagggtcttctccacatccccagccaaagacagccttagctttgaggacttcctggatctcctcagtgtgttcagtgacacagccacgccagacatcaagtcccattatgccttccgcatctttgactttgatgatgacggaaccttgaacagagaagacctgagccggctggtgaactgcctcacgggagagggcgaggacacacggcttagtgcgtctgagatgaagcagctcatcgacaacatcctggaggagtctgacattgacagggatggaaccatcaacctctctgagttccagcacgtcatctcccgttctccagactttgccagctcctttaagattgtcctgtgacagcagccccagcgtgtgtcctggcaccctgtccaagaacctttctactgctgagctgtggccaaggtcaagcctgtgttgccagtgcgggccaagctggcccagcctggagctggcgctgtgcagcctcaccccgggcaggggcggccctcgttgtcagggcctctcctcactgctgttgtcattgctccgtttgtgtttgtactaatcagtaataaaggtttagaagtttgaccct

SEQ ID NO: 7853 - protein, 96 aa, Homo sapiens; identical to SEQ ID NO: 7831

SEQ ID NO: 7854 - DNA, 939 bp, Homo sapiens
ccgccaccatgcccggctaatttttgtatttttagtagagaaggggttcaccatgttgctcagactggtctcagacgcctgacctccaaagctccgcccgccttggcctcccaaagtgctgggattacaggtgtgagccaccgtgcctggccaattctttagggccaacttctggctcctttcccaacttcttcatcccttggggatctctagaatcagtgccaagcacatagtaaatgctcagtaaatactcattgcaagaatagactcctaggctgtactgccttgtgacatgtccttttgcttaccgttgcctgatgactcggaagttctgtgtacgtggttttagctcctcacctggttgacaatgagcagcaggcaaggagtgggaatgaacacacagggagaccgatcgctgagaacaccgacagttcccctctctctaccagagcccacaggcggttttgtgagctgcttccccaggagcagcggagcgtggagtcgtcacttcgggcacaagtgcccttcgagcagattctcagccttccagagctcaaggccaaccccttcaaggacagctcatcgacaacatcctggaggagtctgacattgacagggatggaaccatcaacctctctgagttccagcacgtcatctcccgttctccagactttgccagctcctttaagattgtcctgtgacagcagccccagcgtgtgtcctggcaccctgtccaagaacctttctactgctgagctgtggccaaggtcaagcctgtgttgccagtgcgggccaagctggcccagcctggagctggcgctgtgcagcctcaccccgggcaggggcggccctcgttgtcagggcctctcctcactgctgttgtcattgctccgtttgtgtttgtactaatcagtaataaaggtttagaagtttgaccct

SEQ ID NO: 7855 - protein, 96 aa, Homo sapiens; identical to SEQ ID NO: 7831

SEQ ID NO: 7856 - DNA, 708 bp, Homo sapiens
gcgatggggggctcgggcagtcgcctgtccaaggagctgctggccgagtaccaggacttgacgttcctgacgaagcaggagatcctcctgccaaccccttcaaggagcgaatctgcagggtcttctccacatccccagccaaagacagccttagctttgaggacttcctggatctcctcagtgtgttcagtgacacagccacgccagacatcaagtcccattatgccttccgcatctttgactttgatgatgacggaaccttgaacagagaagacctgagccggctggtgaactgcctcacgggagagggcgaggacacacggcttagtgcgtctgagatgaagcagctcatcgacaacatcctggaggagtctgacattgacagggatggaaccatcaacctctctgagttccagcacgtcatctcccgttctccagactttgccagctcctttaagattgtcctgtgacagcagccccagcgtgtgtcctggcaccctgtccaagaacctttctactgctgagctgtggccaaggtcaagcctgtgttgccagtgcgggccaagctggcccagcctggagctggcgctgtgcagcctcaccccgggcaggggcggccctcgttgtcagggcctctcctcactgctgttgtcattgctccgtttgtgtttgtactaatcagtaataaaggtttagaagtttgaccct

SEQ ID NO: 7857 - protein, 96 aa, Homo sapiens; identical to SEQ ID NO: 7831

SEQ ID NO: 7858 - DNA, 978 bp, Homo sapiens
tgcgtctcgaggcgagttggcggagctgtgcgcgcggcggggcgatggggggctcgggcagtcgcctgtccaaggagctgctggccgagtaccaggacttgacgttcctgacgaagcaggagatcctcctttctgtgtacgtggttttagctcctcacctggttgacaatgagcagcaggcaaggagtgggaatgaacacacagggagaccgatcgctgagaacaccgacagttcccctctctctaccagagcccacaggcggttttgtgagctgcttccccaggagcagcggagcgtggagtcgtcacttcgggcacaagtgcccttcgagcagattctcagccttccagagctcaaggccaaccccttcaaggagcgaatctgcagggtcttctccacatccccagccaaagacagccttagctttgaggacttcctggatctcctcagtgtgttcagtgacacagccacgccagacatcaagtcccattatgccttccgcatctttgactttgatgatgacggaaccttgaacagagaagacctgagccggctggtgaactgcctcacgggagagggcgaggacacacggcttagtgcgtctgagatgaagcagctcatcgacaacatcctggaggagtctgacattgacagggatggaaccatcaacctctctgagttccagcacgtcatctcccgttctccagactttgccagctcctttaagattgtcctgtgacagcagccccagcgtgtgtcctggcaccctgtccaagaacctttctactgctgagctgtggccaaggtcaagcctgtgttgccagtgcgggccaagctggcccagcctggagctggcgctgtgcagcctcaccccgggcaggggcggccctcgttgtcagggcctctcctcactgctgttgtcattgctccgtttgtgtttgtactaatcagtaataaaggtttagaagtttgaccct

SEQ ID NO: 7859 - protein, 231 aa, Homo sapiens; identical to SEQ ID NO: 7841

SEQ ID NO: 7860 - DNA, 971 bp, Homo sapiens
ggaacgcctggcagcttttaggagggggcgggcccgggggtggtggccccaggagcggttgccgcggggaccgggcagtgacgcggcccaagggcggaagtgagaaagttgtctgcgtctcgaggcgagttggcggagctgtgcgcgcggcggggcgatggggggctcgggcagtcgcctgtccaaggagctgctggccgagtaccaggacttgacgttcctgacgaagcaggagatcctcctagcccacaggcggttttgtgagctgcttccccaggagcagcggagcgtggagtcgtcacttcgggcacaagtgcccttcgagcagattctcagccttccagagctcaaggccaaccccttcaaggagcgaatctgcagggtcttctccacatccccagccaaagacagccttagctttgaggacttcctggatctcctcagtgtgttcagtgacacagccacgccagacatcaagtcccattatgccttccgcatctttgactttgatgatgacggaaccttgaacagagaagacctgagccggctggtgaactgcctcacgggagagggcgaggacacacggcttagtgcgtctgagatgaagcagctcatcgacaacatcctggaggagtctgacattgacagggatggaaccatcaacctctctgagttccagcacgtcatctcccgttctccagactttgccagctcctttaagattgtcctgtgacagcagccccagcgtgtgtcctggcaccctgtccaagaacctttctactgctgagctgtggccaaggtcaagcctgtgttgccagtgcgggccaagctggcccagcctggagctggcgctgtgcagcctcaccccgggcaggggcggccctcgttgtcagggcctctcctcactgctgttgtcattgctccgtttgtgtttgtactaatcagtaataaaggtttagaagtttgaccct

SEQ ID NO: 7861 - protein, 191 aa, Homo sapiens; identical to SEQ ID NO: 7843

SEQ ID NO: 7862 - DNA, 1000 bp, Homo sapiens
gcggggccgtgagtcccgggctccgccccggagcgtcgggcccctccccgggccccgcctccagctcgcctaggaccgcttggagccggcagctcgcctgccaaacccggctgggaacgcctggcagcttttaggagggggcgggcccgggggtggtggccccaggagcggttgccgcggggaccgggcagtgacgcggcccaagggcggaagtgagaaagttgtctgcgtctcgaggacttgacgttcctgacgaagcaggagatcctcctagcccacaggcggttttgtgagctgcttccccaggagcagcggagcgtggagtcgtcacttcgggcacaagtgcccttcgagcagattctcagccttccagagctcaaggccaaccccttcaaggagcgaatctgcagggtcttctccacatccccagccaaagacagccttagctttgaggacttcctggatctcctcagtgtgttcagtgacacagccacgccagacatcaagtcccattatgccttccgcatctttgactttgatgatgacggaaccttgaacagagaagacctgagccggctggtgaactgcctcacgggagagggcgaggacacacggcttagtgcgtctgagatgaagcagctcatcgacaacatcctggaggagtctgacattgacagggatggaaccatcaacctctctgagttccagcacgtcatctcccgttctccagactttgccagctcctttaagattgtcctgtgacagcagccccagcgtgtgtcctggcaccctgtccaagaacctttctactgctgagctgtggccaaggtcaagcctgtgttgccagtgcgggccaagctggcccagcctggagctggcgctgtgcagcctcaccccgggcaggggcggccctcgttgtcagggcctctcctcactgctgttgtcattgctccgtttgtgtttgtactaatcagtaataaaggtttagaagtttgaccct

SEQ ID NO: 7863 - protein, 96 aa, Homo sapiens; identical to SEQ ID NO: 7831

SEQ ID NO: 7864 - DNA, 1198 bp, Homo sapiens
aactctctaaactgatgatgaaatacgtcactaatgaagggaccagtggtcccaggggagctgaacacctgacgctgcgcccctaacaacgggtaagaagaaacaagggccgctgcgcaagcagcggcaggacacccggcgccaagggggcgcggcctggagcgccggggcacgaggccctgcttcaagctgagggcccggggagaagccggtacctctccacctcctgcagctcccgttcctccggctcccagtcggaatcggggtccggctcccggccaatagggcctgggcccgccaccccccgggtcgcgaacccacagcgagtgacggcggcgcaaacgcgcccgcccagcaagagactcagggtaaccgccatgtcgacgcaaaccagccttcagcagtcggctacgaaacagcagcggaagtagccgggacttgacgttcctgacgaagcaggagatcctcctagcccacaggcggttttgtgagctgcttccccaggagcagcggagcgtggagtcgtcacttcgggcacaagtgcccttcgagcagattctcagccttccagagctcaaggccaaccccttcaaggagcgaatctgcagggtcttctccacatccccagccaaagacagccttagctttgaggacttcctggatctcctcagtgtgttcagtgacacagccacgccagacatcaagtcccattatgccttccgcatctttgactttgatgatgacggaaccttgaacagagaagacctgagccggctggtgaactgcctcacgggagagggcgaggacacacggcttagtgcgtctgagatgaagcagctcatcgacaacatcctggaggagtctgacattgacagggatggaaccatcaacctctctgagttccagcacgtcatctcccgttctccagactttgccagctcctttaagattgtcctgtgacagcagccccagcgtgtgtcctggcaccctgtccaagaacctttctactgctgagctgtggccaaggtcaagcctgtgttgccagtgcgggccaagctggcccagcctggagctggcgctgtgcagcctcaccccgggcaggggcggccctcgttgtcagggcctctcctcactgctgttgtcattgctccgtttgtgtttgtactaatcagtaataaaggtttagaagtttgaccct

SEQ ID NO: 7865 - protein, 96 aa, Homo sapiens; identical to SEQ ID NO: 7831

SEQ ID NO: 7866 - DNA, 2017 bp, Homo sapiens
gggcggaagtgagaaagttgtctgcgtctcgaggcgagttggcggagctgtgcgcgcggcggggcgatggggggctcgggcagtcgcctgtccaaggagctgctggccgagtaccaggacttgacgttcctgacgaagcaggagatcctcctgtaagtgctgccttgaaccctgcctccgaccccgggatcctctagagacagcttcgggggcgctgtcccgagggaggggcgggggctggcctgaggtctgcagaggagcgggagctggaggccgggagacctagcccgggctgcgccctcctcccggcacgccctccccgccctcgcctgaggccccagcgtggcaccgcggagccaccttacagcctccaggaaaagttaggcgctctttgaccctgggctccactagcttcagcactgccgaacttcctgccccagtccggcaggggccgaccttgcccagtggctaaaccacagaagccttggggagcccggctccttctcccaactttacctgaataatacagtaaccgttatcgctttctgagcactcaccatgtgccagggactgtgctaaatggttgcctgcgttacctaatttaatctttaggagagaggtactggacaatgaaacaggttcagaaaggtttggtaactgcttaagacaacactctgagtaagtagatttgaacttgggctggaagcccttttgccggatttatgcaggccaggttcctgtggcaaagataagctcatgggaaggaggtggaggccgaggaggacagttcagtgtggttgctaaaaaggaggctttgagggtaagagatccctggagtgaaggtgagaatgagatttttggttttgctcttttctccgtttttttttttttgagacagcgtctcgctctgtcgcccaggctggagtgctggggcacgatcttggctcactgcaggctctgcctccgggttcaagtgattctcctgcctccgggttcaagtgattctcctgcctcagcctcctgagtagctgggattataggcacccgccaccatgcccggctaatttttgtatttttagtagagaaggggttcaccatgttgctcagactggtctcagacgcctgacctccaaagctccgcccgccttggcctcccaaagtgctgggattacaggtgtgagccaccgtgcctggccaattctttagggccaacttctggctcctttcccaacttcttcatcccttggggatctctagaatcagtgccaagcacatagtaaatgctcagtaaatactcattgcaagaatagactcctaggctgtactgccttgtgacatgtccttttgcttaccgttgcctgatgactcggaagttctgtgtacgtggttttagctcctcacctggttgacaatgagcagcaggcaaggagtgggaatgaacacacagggagaccgatcgctgagaacaccgacagttcccctctctctaccagagcccacaggcggttttgtgagctgcttccccaggagcagcggagcgtggagtcgtcacttcgggcacaagtgcccttcgagcagattctcagccttccagagctcaaggtgcaagcgctcccctcctttgacacctctcccaccactccctccctgctagaccccctaactccatctgccactagctttgggatcatggggtcactggtccccactctggtcatttttctgcttagttctgattttctaggggcaaggactttaccaaaatcacctggcagaattatctagaatggtgcttttcaaatggggattctagaacataatcttggaagttcaaagaagttttgtcccttaagaggagttgaggtacctcattagagtttgaggaaccgtgttctagaggctgattgccactccgtaaggctgctgcaaaatttctgtgcaaagggcctggcccggtgcctgtaacacaatagctgttcaagtaaatatttgtgttttaaaataaccagcccatctc

SEQ ID NO: 7867 - protein, 80 aa, Homo sapiens
MSSRQGVGMNTQGDRSLRTPTVPLSLPEPTGGFVSCFPRSSGAWSRHFGHKCPSSRFSAFQSSRCKRSPPLTPLPPLPPC

SEQ ID NO: 7868 - DNA, 756 bp, Homo sapiens
ggcggaagtgagaaagttgtctgcgtctcgaggacttgacgttcctgacgaagcaggagatcctcctgtaagtgctgccttgaaccctgcctccgaccccgggatcctctagagacagcttcgggggcgctgtcccgagggaggggcgggggctggcctgaggtctgcagaggagcgggagctggaggccgggagacctagcccgggctgcgccctcctcccggcacgccctccccgccctcgcctgaggccccagcgtggcaccgcggagccaccttacagcctccaggaaaagttaggcgctctttgaccctgggctccactagcttcagcactgccgaacttcctgccccagtccggcaggggccgaccttgcccagtggctaaaccacagaagccttggggagcccggctccttctcccaactttacctgaataatacagtaaccgttatcgctttctgagcactcaccatgtgccagggactgtgctaaatggttgcctgcgttacctaatttaatctttaggagagaggtactggacaatgaaacaggttcagaaaggtttggtaactgcttaagacaacactctgagtaagtagatttgaacttgggctggaagcccttttgccggatttatgcaggccaggttcctgtggcaaagataagctcatgggaaggaggtggaggccgaggaggacagttcagtgtggttgctaaaaaggaggctttgagggtaagagatccctggagtgaa

SEQ ID NO: 7869 - protein, 36 aa, Homo sapiens
AEVRKLSASRGLDVPDEAGDPPVSAALNPASDPGIL

SEQ ID NO: 7870 - DNA, 2003 bp, Homo sapiens
agtgctgaagctagtggagcccagggtcaaagagcgcctaacttttcctggaggctgtaaggtggctccgcggtgccacgctggggcctcaggcgagggcggggagggcgtgccgggaggagggcgcagcccgggctaggtctcccggcctccagctcccgctcctctgcagacctcaggccagcccccgcccctccctcgggacagcgcccccgaagctgtctctagaggatcccggggtcggaggcagggttcaaggcagcacttacaggaggatctcctgcttcgtcaggaacgtcaagtcctggaaggcaaagccagagcggggattagcggaccgctgggaggccgcggccgccccgcagccagctcccggaccctgctcccgagaagaggcccgcacgcgagctccccagggccaggcgtcccgcgcacctggtactcggccagcagctccttggacaggcgactgcccgagccccccatcgccccgccgcgcgcacagctccgccaactcgcctcgagacgcagacaactttctcacttccgcccttgggccgcgtcactgcccggtccccgcggcaaccgctcctggggccaccacccccgggcccgccccctcctaaaagctgccaggcgttcccagccgggtttggcaggcgagctgccggctccaagcggtcctaggctatttactgaggacccactggatgtcaagcattgtgcatagttttcttcgattgttgcaacatcccttgcgagtttctggagcagcagagctgaaggaacccaaacttggactgaagtgactctactaaggtcagctctatggctcttccacatgattcaaacgaaacttcctatttgctgcctcccaacaatgaggactggggcaggcaaaccattcctgactttgtttatgggcagaaggatctcatggcagaagggattcagtggccaaggaatgcacctggcatcccagatgctctgccacaatctccctttgatgctgcactctgctctgcctggaagcagcgggtggagctggggctgtttcgctaccgtctacgggagctacagacccaaatcctccctggtgctgtgggtttcgtggctcagctgaatgtggagcgtggtgtgcagaggaggcccccgcagaccatcaagagtgtgaggcaggcatttgaccctgtacagttcaacttcaacaagatccggcccggagaagtcctcttccgtttgcaccgggagcctgatctccctgggactctgctgcaagaagacatcctggtggtgatcaacgtcagccccctggagtggggccacgtgctgctggtgcctgagcctgcccgccagctcccccagcgcctgctgccgggtgcactgagggcagggattgaggctgtgctgctgagcttacacccgggcttccgtgtcggcttcaacagcctgggaggcttggcctcggtgaaccacctccacctgcatggctattacctggcccacagactgcccgtggagcaggcgccaagcgagcccctggaccctggaggccatttgcatctgctccaggacctcccagctcctggcttcctcttttacactcgtgggccagggcctgacttggagtccttgataagcagggtatgtcgggccactgattatctgactgaccatgagattgctcataacttgtttgtcacccggggagctccgccgggaaagacatcaccttcctcagccctcacaggggtccgagtaattctgtgggcccggaagtccagctttgggataaaggacggtgaagctttcaatgttgccctctgtgagctggctgggcacctccctgtcaaaacatcccaggacttcagcagcctgacagaggcagctgctgtggccctcattcaggactgtcggctgcccccatcccaggcagaagacgtacaggcagcactggtggccctgatgtcccaggaagagcaataatacttctggatgtattt

SEQ ID NO: 7871 - protein, 32 aa, Homo sapiens
MSSIVHSFLRLLQHPLRVSGAAELKEPKLGLK

SEQ ID NO: 7872 - DNA, 1350 bp, Homo sapiens
tgcggggaaagtcgcgaggtgcatccgcttcggctgcagctatttactgaggacccactggatgtcaagcattgtgcatagttttcttcgattgttgcaacatcccttgcgagtttctggagcagcagagctgaaggaacccaaacttggactgaagtgactctactaaggtcagctctatggctcttccacatgattcaaacgaaacttcctatttgctgcctcccaacaatgaggactggggcaggcaaaccattcctgactttgtttatgggcagaaggatctcatggcagaagggattcagtggccaaggaatgcacctggcatcccagatgctctgccacaatctccctttgatgctgcactctgctctgcctggaagcagcgggtggagctggggctgtttcgctaccgtctacgggagctacagacccaaatcctccctggtgctgtgggtttcgtggctcagctgaatgtggagcgtggtgtgcagaggaggcccccgcagaccatcaagagtgtgaggcaggcatttgaccctgtacagttcaacttcaacaagatccggcccggagaagtcctcttccgtttgcaccgggagcctgatctccctgggactctgctgcaagaagacatcctggtggtgatcaacgtcagccccctggagtggggccacgtgctgctggtgcctgagcctgcccgccagctcccccagcgcctgctgccgggtgcactgagggcagggattgaggctgtgctgctgagcttacacccgggcttccgtgtcggcttcaacagcctgggaggcttggcctcggtgaaccacctccacctgcatggctattacctggcccacagactgcccgtggagcaggcgccaagcgagcccctggaccctggaggccatttgcatctgctccaggacctcccagctcctggcttcctcttttacactcgtgggccagggcctgacttggagtccttgataagcagggtatgtcgggccactgattatctgactgaccatgagattgctcataacttgtttgtcacccggggagctccgccgggaaagacatcaccttcctcagccctcacaggggtccgagtaattctgtgggcccggaagtccagctttgggataaaggacggtgaagctttcaatgttgccctctgtgagctggctgggcacctccctgtcaaaacatcccaggacttcagcagcctgacagaggcagctgctgtggccctcattcaggactgtcggctgcccccatcccaggcagaagacgtacaggcagcactggtggccctgatgtcccaggaagagcaataatacttctggatgt

SEQ ID NO: 7873 - protein, 32 aa, Homo sapiens; identical to SEQ ID NO: 7871

SEQ ID NO: 7874 - DNA, 1158 bp, Homo sapiens
atggctcttccacatgattcaaacgaaacttcctatttgctgcctcccaacaatgaggactggggcaggcaaaccattcctgactttgtttatgggcagaaggatctcatggcagaagggattcagtggccaaggaatgcacctggcatcccagatgctctgccacaatctccctttgatgctgcactctgctctgcctggaagcagcgggtggagctggggctgtttcgctaccgtctacgggagctacagacccaaatcctccctggtgctgtgggtttcgtggctcagctgaatgtggagcgtggtgtgcagaggaggcccccgcagaccatcaagagtgtgaggcaggcatttgaccctgtacagttcaacttcaacaagatccggcccggagaagtcctcttccgtttgcaccgggagcctgatctccctgggactctgctgcaagaagacatcctggtggtgatcaacgtcagccccctggagtggggccacgtgctgctggtgcctgagcctgcccgccagctcccccagcgcctgctgccgggtgcactgagggcagggattgaggctgtgctgctgagcttacacccgggcttccgtgtcggcttcaacagcctgggaggcttggcctcggtgaaccacctccacctgcatggctattacctggcccacagactgcccgtggagcaggcgccaagcgagcccctggaccctggaggccatttgcatctgctccaggacctcccagctcctggcttcctcttttacactcgtgggccagggcctgacttggagtccttgataagcagggtatgtcgggccactgattatctgactgaccatgagattgctcataacttgtttgtcacccggggagctccgccgggaaagacatcaccttcctcagccctcacaggggtccgagtaattctgtgggcccggaagtccagctttgggataaaggacggtgaagctttcaatgttgccctctgtgagctggctgggcacctccctgtcaaaacatcccaggacttcagcagcctgacagaggcagctgctgtggccctcattcaggactgtcggctgcccccatcccaggcagaagacgtacaggcagcactggtggccctgatgtcccaggaagagcaataa

SEQ ID NO: 7875 - protein, 385 aa, Homo sapiens
MALPHDSNETSYLLPPNNEDWGRQTIPDFVYGQKDLMAEGIQWPRNAPGIPDALPQSPFDAALCSAWKQRVELGLFRYRLRELQTQILPGAVGFVAQLNVERGVQRRPPQTIKSVRQAFDPVQFNFNKIRPGEVLFRLHREPDLPGTLLQEDILVVINVSPLEWGHVLLVPEPARQLPQRLLPGALRAGIEAVLLSLHPGFRVGFNSLGGLASVNHLHLHGYYLAHRLPVEQAPSEPLDPGGHLHLLQDLPAPGFLFYTRGPGPDLESLISRVCRATDYLTDHEIAHNLFVTRGAPPGKTSPSSALTGVRVILWARKSSFGIKDGEAFNVALCELAGHLPVKTSQDFSSLTEAAAVALIQDCRLPPSQAEDVQAALVALMSQEEQ

SEQ ID NO: 7876 - DNA, 1801 bp, Homo sapiens
aacggcggcggccacgggcttgctagaggaagcgctgccccggcagccgcagccacggccaccgggagctaggagtgaacccctgcgggggagcagcttccccctcgcgatcgtggggacagccagtcctgtgaaacgaggaggcggttccggacgcccagaaacgcccagggagacctggagccgggggaagaggggacatgagcggccagctgagtccatccccaggcggctaggggcggacccagcagcccctcagctctcctcgtaaccacggaatctgagagaatggagccgagtacctgtaggaccatggaatcagaggaagactatgttgaggaaaaggaatctgagaagtgtgttaaagagggagttaccaacccctctaactcttcacagcaggctctcttaaaagctgactataaggcattaaaaaatggggttccctcacccattatggccacaaaaattccgaagaaagtcatagccccagttgacacaggcgacttagaagctgggaggaggaagagaaggcggaaacgcagatcactggccatcaacctgaccaactgcaagtatgagagtgtgcgtcgggcagcccaaatgtgtggcctgaaggaggtgggggaggatgaagagtggactctgtactggacagactgcgctgtctcactggaacgagtcatggacatgaagaggtttcagaaaatcaaccacttccctggcatgacagaaatctgccgcaaagatctgctggctcggaacctcaaccgcatgtacaaactctatccctctgagtacaacatcttcccccgcacctggtgcctccccgcagactatggggacttccagtcctacggtcgtcagcgaaaagcccgcacatatatctgcaagccagacagtggctgtcagggacgtggcatcttcattacccgaaatccccgggagatcaagccaggagagcatatgatctgccagcaatacatctccaagcccctcctcattgatggcttcaagtttgatatgcgagtctacgtcctgatcacatcctgtgaccctctccggatcttcacatatgaggagggcctagcccgttttgccaccacgccctatatggagcccagccataacaacctggacaatgtctgcatgcacctgaccaactatgctatcaacaaacacaatgagaattttgtccgggatggcgctgtgggcagtaagaggaagctgtcgacactcaacatctggctgcaagagcacagctacaaccctggagagctgtggggggacatcgaggacatcatcatcaaaaccatcatctcagcccattctgttctacgccacaactaccgaacctgttttccccagtatctgaatggaggtacatgtgcctgttttgaaatccttggttttgacatcttgctggaccacaagttgaagccctggctgctagaggtaaaccactctccaagctttaccacggactcatgccttgatcaagaagtaaaggatgcacttctctgtgatgctatgacccttgtcaacctccggggctgtgacaaaaggaaggtgatggaggaggataagcggcgagtcaaggaacggcttttccagtgctaccgacagccacgagaatctaggtgtgctaggtgtctggcatgtgtttagttcttcattattcctgagagtaaaagtcctcctttagatgaagaatgtggcctggggctgatttgctatcaaaaacaactttttgcatagataatatgttcatatttgcattaaaaaaatcacaggaccaggc

SEQ ID NO: 7877 - protein, 459 aa, Homo sapiens; identical to SEQ ID NO: 1092

SEQ ID NO: 7878 - DNA, 3843 bp, Homo sapiens
agaggaagcgctgccccggcagccgcagccacggccaccgggagctaggagtgaacccctgcgggggagcagcttccccctcgcgatcgtggggacagccagtcctgtgaaacgaggaggcggttccggacgcccagaaacgcccagggagacctggagccgggggaagaggggacatgagcggccagctgagtccatccccaggcggctaggggcggacccagcagcccctcagctctcctcgtaaccacggaatctgagagaatggagccgagtacctgtaggaccatggaatcagaggaagactatgttgaggaaaaggaatctgagaagtgtgttaaagagggagttaccaacccctctaactcttcacagcaggctctcttaaaagctgactataaggcattaaaaaatggggttccctcacccattatggccacaaaaattccgaagaaagtcatagccccagttgacacaggcgacttagaagctgggaggaggaagagaaggcggaaacgcagatcactggccatcaacctgaccaactgcaagtatgagagtgtgcgtcgggcagcccaaatgtgtggcctgaaggaggtgggggaggatgaagagtggactctgtactggacagactgcgctgtctcactggaacgagtcatggacatgaagaggtttcagcccctcctcattgatggcttcaagtttgatatgcgagtctacgtcctgatcacatcctgtgaccctctccggatcttcacatatgaggagggcctagcccgttttgccaccacgccctatatggagcccagccataacaacctggacaatgtctgcatgcacctgaccaactatgctatcaacaaacacaatgagaattttgtccgggatggcgctgtgggcagtaagagtatctgaatggaggtacatgtgcctgttttgaaatccttggttttgacatcttgctggaccacaagttgaagccctggctgctagaggtaaaccactctccaagctttaccacggactcatgccttgatcaagaagtaaaggatgcacttctctgtgatgctatgacccttgtcaacctccggggctgtgacaaaaggaaggtgatggaggaggataagcggcgagtcaaggaacggcttttccagtgctaccgacagccacgagaatctaggaaagaaaaaactgagtcatcccatgtggcaatgctggaccaggaacgatatgaggattctcacctgggaaaataccggcggatctaccctgggcctgacacagagaagtatgcccgcttcttcaagcacaatggctccctcttccaagagactgctgcttccaaggccagagaggagtgtgccagctgctgccgggacagctggacaccatgaggcctcaagaaattgtggaagaggaggagctggagcggatgaaggccctgctacaaagggagactctcatccgaagcctgggtattgtagagcagctcacccgtctgcagcaccctggcccccagggccagaaaaaacttcatgagagtcgggtgagggtccctgtgaagtctcccagaggaaaagggaacaagggctgtcattccaggacatggtgttggtctcaacaaaggaggcttgtgtgatggtatctgtcagtggagcctgggaaagcagagtgcgctagctggaccttgggagagggtctgttgattccttttgcgtctgttcccaagctcctttgttttagatatgacatccagcaagttgcagctccaaaccttctcatttacaggaaacttgctctctatattcctgtcccaaaataaccccacactcatgactgacaaataacaagcccaccaccctcagtggcttctgtataattttctccctagcactgccagtgccccagctctaatgggagataagtaaacagatttgggccaacaaaagagctgccgctttcactattccctgggctggtagcaaacctgttgggtcttctgtttttgttgaaccccaaaggagtatctggttaaatagtggccgcggcctagaagagatttttttcagttacctccttcttccaacgctccatccaaacttacataaaaatgtggtaaggggctgctcttctcctctagcctagattttgctaggacaggctgggcagtcaagaactgaaatctatgagtctggtcctactggtgctcctaagaggggctgccacagagcagggcgctcctcatttcctgcatccagttctgccccatgaatcaatccccaggatcttaggggcactgccaagcatgaatgctgcaatcccacatgttccccggtaccatctgcagcccaagaacttcaactggacaggagagccggcagccatcaactcctgttcattgtcaatgaagaaggctgggaggtgctatttttccagtgccagaatcaggctcactagccaaggacaagccagcagaaggctagaagccataaaccgagtcctggcaggatcagtgccacccactttaaccccaaagcagggctattttctgcaaccggaaagagtggcatctgactcatggactgaatgcaccttgccctccatggtaaactctgaacacagagcagccaaggttcccctctgccctgcgtctgcacccatgctgcagcgttccagagcactcctcaacatcaatcagttcagcaccctgaaacgacagaaacaagcaatccgattccagaaaattcggaggcaaatggaggcgcctggtgccccgcccaggaccctgacgtgggaagccatggagcagatacggtatttacatgaggaatttccagagtcctggtcagttcccaggttggctgaaggctttgatgtcagcactgatgtgatccgaagagttttaaaaagcaagtttttacccacattggagcagaagctgaagcaggatcaaaaagtccttaagaaagctgggcttgcccactcgctgcagcacctccggggctctggaaatacctcaaagctgctccctgcaggccactctgtatcaggctctttgcttatgccagggcatgaagcctcatctaaagacccaaatcacagcacagctttgaaagtgatagagtcagacactcacaggacaaatacaccaaggagaaggaagggaagaaataaagaaatccaggacctggaggagagctttgtgcctgttgctgcacccctaggtcatccaagagagctgcagaagtactccagtgattctgagagccccagaggaactggcagtggtgcgttgccaagtggtcagaagctggaggagttgaaggcagaggagccagataacttcagcagcaaagtagtgcagaggggccgagagttctttgacagcaacgggaacttcctgtacagaatttgagtcggggcttggcttatggagatgcctcgtgaaacacagctgggcaagtattaatgtatatggaacagcctggatttctgcatatggataagccaccttggaataggaagaggtgttgagcctggactgtgggaggaaagagctgcgtggatagattcaaacttcctgtggtagtgctcccagtctgacctctgtagaccttcagtactcactcttcttgcttaggctctctgtgtgttgaaagccatcccgtgttgcatgtgttgttacaattttctgtgatacttgcaatttatgtttgagaagaagtgaaaagtttgccttctgacctcatttccttcttgatcagtgaacactaacattttggggacaacttagtcaattggttttccttacaacaaaataaagtaaaatgtagcagtctg

SEQ ID NO: 7879 - protein, 409 aa, Homo sapiens
MSLVLLVLLRGAATEQGAPHFLHPVLPHESIPRILGALPSMNAAIPHVPRYHLQPKNFNWTGEPAAINSCSLSMKKAGRCYFSSARIRLTSQGQASRRLEAINRVLAGSVPPTLTPKQGYFLQPERVASDSWTECTLPSMVNSEHRAAKVPLCPASAPMLQRSRALLNINQFSTLKRQKQAIRFQKIRRQMEAPGAPPRTLTWEAMEQIRYLHEEFPESWSVPRLAEGFDVSTDVIRRVLKSKFLPTLEQKLKQDQKVLKKAGLAHSLQHLRGSGNTSKLLPAGHSVSGSLLMPGHEASSKDPNHSTALKVIESDTHRTNTPRRRKGRNKEIQDLEESFVPVAAPLGHPRELQKYSSDSESPRGTGSGALPSGQKLEELKAEEPDNFSSKVVQRGREFFDSNGNFLYRI

SEQ ID NO: 7880 - DNA, 1085 bp, Homo sapiens
atgctggaccaggaacgatatgaggattctcacctgggaaaataccggcggatctaccctgggcctgacacagagaagtatgcccgcttcttcaagcacaatggctccctcttccaagagactgctgcttccaaggccagagaggagtgtgccaggcagcaactagaggagatccgccttaagcaggaacagcaggagacctcgggcactaagaggcaaaaggccagggaccagaaccagggtgaatcagctggggagaaaagccgacccagggcagggctccagagcctttccacccacttggcttacaggaaccgcaactgggagaaagagctgctgccgggacagctggacaccatgaggcctcaagaaattgtggaagaggaggagctggagcggatgaaggccctgctacaaagggagactctcatccgaagcctgggtattgtagagcagctcacccgtctgcagcaccctggcccccagggccagaaaaaacttcatgagagtcggcccaagaacttcaactggacaggagagccggcagccatcaactcctgttcattgtcaatgaagaaggctgggaggtgctatttttccagtgccagaatcaggctcactagccaaggacaagccagcagaaggctagaagccataaaccgagtcctggcaggatcagtgccacccactttaaccccaaagcagggctattttctgcaaccggaaagagtggcatctgactcatggactgaatgcaccttgccctccatggtaaactctgaacacagagcagccaaggttcccctctgccctgcgtctgcacccatgctgcagcgttccagagcactcctcaacatcaatcagttcaggtgcggcccggggctggaggccatccaggagacaatgagcccctttcccagagaagccgagtgcccaaggcactgggctgtcgccgtcagaagactgccgagcggaagccctgcccaccgaggtggcggagacaggcaggcctgggcagccgctggggcggagggacggctcttggaaacggaatccgtactttaattaaagtttatgcagttttc

SEQ ID NO: 7881 - protein, 354 aa, Homo sapiens
MLDQERYEDSHLGKYRRIYPGPDTEKYARFFKHNGSLFQETAASKAREECARQQLEEIRLKQEQQETSGTKRQKARDQNQGESAGEKSRPRAGLQSLSTHLAYRNRNWEKELLPGQLDTMRPQEIVEEEELERMKALLQRETLIRSLGIVEQLTRLQHPGPQGQKKLHESRPKNFNWTGEPAAINSCSLSMKKAGRCYFSSARIRLTSQGQASRRLEAINRVLAGSVPPTLTPKQGYFLQPERVASDSWTECTLPSMVNSEHRAAKVPLCPASAPMLQRSRALLNINQFRCGPGLEAIQETMSPFPREAECPRHWAVAVRRLPSGSPAHRGGGDRQAWAAAGAEGRLLETESVL

SEQ ID NO: 7882 - DNA, 1880 bp, Homo sapiens
tacttccgctgctgtttcgtagccgactgctgaaggctggtttgcgtcgacatggcggttaccctgagtctcttgctgggcgggcgcgtttgcgccgccgtcactcgctgtgggttcgcgacccggggggtggcgggcccaggccctattggccgggagccggaccccgattccgactgggagccggaggaacgggagctgcaggaggtggagaggtaccggcttctccccgggccctcagcttgaagcagggcctcgtgccccggcgctccaggccgcgcccccttggcgccgggtgtcctgccgctgcttgcgcagcggcccttgtttcttcttacccgttgttaggggcgcagcgtcaggtgttcagctcccctgggaccactggtcccttcattagtgacgtatttcatcatcagtttagagagttcggcatgcttacaggcagttattgttctaggtgttagctttctgggtgtacggagcagctctaagccggcaacatggcccggttgcccttgcgatcaaagagaagagggctgggcgctccatgatttagcctgaggctcttcaaacatccattctgcttccacgcatggcttctgccattggttctcttcccccagcaccctgaaacgacagaaacaagcaatccgattccagaaaattcggaggcaaatggaggcgcctggtgccccgcccaggaccctgacgtgggaagccatggagcagatacggtatttacatgaggaatttccagagtcctggtcagttcccaggttggctgaaggctttgatgtcagcactgatgtgatccgaagagttttaaaaagcaagtttttacccacattggagcagaagctgaagcaggatcaaaaagtccttaagaaagctgggcttgcccactcgctgcagcacctccggggctctggaaatacctcaaagctgctccctgcaggccactctgtatcaggctctttgcttatgccagggcatgaagcctcatctaaagacccaaatcacagcacagctttgaaagtgatagagtcagacactcacaggacaaatacaccaaggagaaggaagggaagaaataaagaaatccaggacctggaggagagctttgtgcctgttgctgcacccctaggtcatccaagagagctgcagaagtactccagtgattctgagagccccagaggaactggcagtggtgcgttgccaagtggtcagaagctggaggagttgaaggcagaggagccagataacttcagcagcaaagtagtgcagaggggccgagagttctttgacagcaacgggaacttcctgtacagaatttgagtcggggcttggcttatggagatgcctcgtgaaacacagctgggcaagtattaatgtatatggaacagcctggatttctgcatatggataagccaccttggaataggaagaggtgttgagcctggactgtgggaggaaagagctgcgtggatagattcaaacttcctgtggtagtgctcccagtctgacctctgtagaccttcagtactcactcttcttgcttaggctctctgtgtgttgaaagccatcccgtgttgcatgtgttgttacaattttctgtgatacttgcaatttatgtttgagaagaagtgaaaagtttgccttctgacctcatttccttcttgatcagtgaacactaacattttggggacaacttagtcaattggttttccttacaacaaaataaagtaaaatgtagcagtctgcctctttggtgctctttggggtgggatggtttacctgtgaaccttggagagagggaaggacaaaggcagaaaggaaggatccctggtcagtaaacattgggagagagatggaaccag

SEQ ID NO: 7883 - protein, 219 aa, Homo sapiens; identical to SEQ ID NO: 1096

SEQ ID NO: 7884 - DNA, 1470 bp, Homo sapiens
tacttccgctgctgtttcgtagccgactgctgaaggctggtttgcgtcgacatggcggttaccctgagtctcttgctgggcgggcgcgtttgcgccgccgtcactcgctgtgggttcgcgacccggggggtggcgggcccaggccctattggccgggagccggaccccgattccgactgggagccggaggaacgggagctgcaggaggtggagaggtaccggcttctccccgggccctcagcttgaagcagggcctcgtgccccggcgctccaggccgcgcccccttggcgccgggtgtcctgccgctgcttgcgcagcggcccttgtttcttcttacccgttgttaggggcgcagcgtcaggtgttcagctcccctgggaccactggtcccttcattagtgacgtatttcatcatcagtttagagagttcggcatgcttacaggcagttattgttctaggtgttagctttctgggtgtacggagcagctctaagccggcaacatggcccggttgcccttgcgatcaaagagaagagggctgggcgctccatgatttagcctgaggctcttcaaacatccattctgcttccacgcatggcttctgccattggttctcttcccccagcaccctgaaacgacagaaacaagcaatccgattccagaaaattcggaggcaaatggaggcgcctggtgccccgcccaggaccctgacgtgggaagccatggagcagatacggtcatccaagagagctgcagaagtactccagtgattctgagagccccagaggaactggcagtggtgcgttgccaagtggtcagaagctggaggagttgaaggcagaggagccagataacttcagcagcaaagtagtgcagaggggccgagagttctttgacagcaacgggaacttcctgtacagaatttgagtcggggcttggcttatggagatgcctcgtgaaacacagctgggcaagtattaatgtatatggaacagcctggatttctgcatatggataagccaccttggaataggaagaggtgttgagcctggactgtgggaggaaagagctgcgtggatagattcaaacttcctgtggtagtgctcccagtctgacctctgtagaccttcagtactcactcttcttgcttaggctctctgtgtgttgaaagccatcccgtgttgcatgtgttgttacaattttctgtgatacttgcaatttatgtttgagaagaagtgaaaagtttgccttctgacctcatttccttcttgatcagtgaacactaacattttggggacaacttagtcaattggttttccttacaacaaaataaagtaaaatgtagcagtctgcctctttggtgctctttggggtgggatggtttacctgtgaaccttggagagagggaaggacaaaggcagaaaggaaggatccctggtcagtaaacattgggagagagatggaaccag

SEQ ID NO: 7885 - protein, 30 aa, Homo sapiens
MEAPGAPPRTLTWEAMEQIRSSKRAAEVLQ

SEQ ID NO: 7886 - DNA, 786 bp, Homo sapiens
tacttccgctgctgtttcgtagccgactgctgaaggctggtttgcgtcgacatggcggttaccctgagtctcttgctgggcgggcgcgtttgcgccgccgtcactcgctgtgggttcgcgacccggggggtggcgggcccaggccctattggccgggagccggaccccgattccgactgggagccggaggaacgggagctgcaggaggtggagaggtaccggcttctccccgggccctcagcttgaagcagggcctcgtgccccggcgctccaggccgcgcccccttggcgccgggtgtcctgccgctgcttgcgcagcggcccttgtttcttcttacccgttgttaggggcgcagcgtcaggtgttcagctcccctgggaccactggtcccttcattagtgacgtatttcatcatcagtttagagagttcggcatgcttacaggcagttattgttctaggtgttagctttctgggtgtacggagcagctctaagccggcaacatggcccggttgcccttgcgatcaaagagaagagggctgggcgctccatgatttagcctgaggctcttcaaacatccattctgcttccacgcatggcttctgccattggttctcttcccccagcaccctgaaacgacagaaacaagcaatccgattccagaaaattcggaggcaaatggaggcgcctggtgccccgcccaggaccctgacgtgggaagccatggagcagatacggttgtgacgttcccaacctaaggtacagggatgctggtgcttccatagg

SEQ ID NO: 7887 - protein, 64 aa, Homo sapiens
MAVTLSLLLGGRVCAAVTRCGFATRGVAGPGPIGREPDPDSDWEPEERELQEVERYRLLPGPSA

SEQ ID NO: 7888 - DNA, 1670 bp, Homo sapiens
tacttccgctgctgtttcgtagccgactgctgaaggctggtttgcgtcgacatggcggttaccctgagtctcttgctgggcgggcgcgtttgcgccgccgtcactcgctgtgggttcgcgacccggggggtggcgggcccaggccctattggccgggagccggaccccgattccgactgggagccggaggaacgggagctgcaggaggtggagaggtaccggcttctccccgggccctcagcttgaagcagggcctcgtgccccggcgctccaggccgcgcccccttggcgccgggtgtcctgccgctgcttgcgcagcggcccttgtttcttcttacccgttgttaggggcgcagcgtcaggtgttcagctcccctgggaccactggtcccttcattagtgacgtatttcatcatcagtttagagagttcggcatgcttacaggcagttattgttctaggtgttagctttctgggtgtacggagcagctctaagccggcaacatggcccggttgcccttgcgatcaaagagaagagggctgggcgctccatgatttagcctgaggctcttcaaacatccattctgcttccacgcatggcttctgccattggttctcttcccccagcaccctgaaacgacagaaacaagcaatccgattccagaaaattcggaggcaaatggaggcgcctggtgccccgcccaggaccctgacgtgggaagccatggagcagatacggtatttacatgaggaatttccagagtcctggtcagttcccaggttggctgaaggctttgatgtcagcactgatgtgatccgaagagttttaaaaagcaagtttttacccacattggagcagaagctgaagcaggatcaaaaagtccttaagaaagctgggcttgcccactcgctgcagcacctccggggctctggaaatacctcaaagctgctccctgcaggccactctgtatcaggctctttgcttatgccagggcatgaagcctcatctaaagacccaaatcacagcacagctttgaaagtgatagagtcagacactcacaggacaaatacaccaaggagaaggaagggaagaaataaagaaatccaggacctggaggagagctttgtgcctgttgctgcacccctaggtcatccaagagagctgcagaagtactccagtgattctgagagccccagaggaactggcagtggtgcgttgccaagtggtcagaagctggaggagttgaaggcagaggagccagataacttcagcagcaaagtagtgcagaggggccgagagttctttgacagcaacgggaacttcctgtacagaatttgagtcggggcttggcttatggagatgcctcgtgaaacacagctgggcaagtattaatgtatatggaacagcctggatttctgcatatggataagccaccttggaataggaagaggtgttgagcctggactgtgggaggaaagagctgcgtggatagattcaaacttcctgtggtagtgctcccagtctgacctctgtagaccttcagtactcactcttcttgcttaggctctctgtgtgttgaaagccatcccgtgttgcatgtgttgttacaattttctgtgatacttgcaatttatgtttgagaagaagtgaaaagtttgccttctgacctc

SEQ ID NO: 7889 - protein, 219 aa, Homo sapiens; identical to SEQ ID NO: 1096

SEQ ID NO: 7890 - DNA, 1260 bp, Homo sapiens
tacttccgctgctgtttcgtagccgactgctgaaggctggtttgcgtcgacatggcggttaccctgagtctcttgctgggcgggcgcgtttgcgccgccgtcactcgctgtgggttcgcgacccggggggtggcgggcccaggccctattggccgggagccggaccccgattccgactgggagccggaggaacgggagctgcaggaggtggagaggtaccggcttctccccgggccctcagcttgaagcagggcctcgtgccccggcgctccaggccgcgcccccttggcgccgggtgtcctgccgctgcttgcgcagcggcccttgtttcttcttacccgttgttaggggcgcagcgtcaggtgttcagctcccctgggaccactggtcccttcattagtgacgtatttcatcatcagtttagagagttcggcatgcttacaggcagttattgttctaggtgttagctttctgggtgtacggagcagctctaagccggcaacatggcccggttgcccttgcgatcaaagagaagagggctgggcgctccatgatttagcctgaggctcttcaaacatccattctgcttccacgcatggcttctgccattggttctcttcccccagcaccctgaaacgacagaaacaagcaatccgattccagaaaattcggaggcaaatggaggcgcctggtgccccgcccaggaccctgacgtgggaagccatggagcagatacggtcatccaagagagctgcagaagtactccagtgattctgagagccccagaggaactggcagtggtgcgttgccaagtggtcagaagctggaggagttgaaggcagaggagccagataacttcagcagcaaagtagtgcagaggggccgagagttctttgacagcaacgggaacttcctgtacagaatttgagtcggggcttggcttatggagatgcctcgtgaaacacagctgggcaagtattaatgtatatggaacagcctggatttctgcatatggataagccaccttggaataggaagaggtgttgagcctggactgtgggaggaaagagctgcgtggatagattcaaacttcctgtggtagtgctcccagtctgacctctgtagaccttcagtactcactcttcttgcttaggctctctgtgtgttgaaagccatcccgtgttgcatgtgttgttacaattttctgtgatacttgcaatttatgtttgagaagaagtgaaaagtttgccttctgacctc

SEQ ID NO: 7891 - protein, 30 aa, Homo sapiens; identical to SEQ ID NO: 7885

SEQ ID NO: 7892 - DNA, 1525 bp, Homo sapiens
tacttccgctgctgtttcgtagccgactgctgaaggctggtttgcgtcgacatggcggttaccctgagtctcttgctgggcgggcgcgtttgcgccgccgtcactcgctgtgggttcgcgacccggggggtggcgggcccaggccctattggccgggagccggaccccgattccgactgggagccggaggaacgggagctgcaggaggtggagaggtaccggcttctccccgggccctcagcttgaagcagggcctcgtgccccggcgctccaggccgcgcccccttggcgccgggtgtcctgccgctgcttgcgcagcggcccttgtttcttcttacccgttgttaggggcgcagcgtcaggtgttcagctcccctgggaccactggtcccttcattagtgacgtatttcatcatcagtttagagagttcggcatgcttacaggcagttattgttctaggtgttagctttctgggtgtacggagcagctctaagccggcaacatggcccggttgcccttgcgatcaaagagaagagggctgggcgctccatgatttagcctgaggctcttcaaacatccattctgcttccacgcatggcttctgccattggttctcttcccccagcaccctgaaacgacagaaacaagcaatccgattccagaaaattcggaggcaaatggaggcgcctggtgccccgcccaggaccctgacgtgggaagccatggagcagatacggtatttacatgaggaatttccagagtcctggtcagttcccaggttggctgaaggctttgatgtcagcactgatgtgatccgaagagttttaaaaagcaagtttttacccacattggagcagaagctgaagcaggatcaaaaagtccttaagaaagctgggcttgcccactcgctgcagcacctccggggctctggaaatacctcaaagctgctccctgcaggccactctgtatcaggctctttgcttatgccagggcatgaagcctcatctaaagacccaaatcacagcacagctttgaaagtgatagagtcagacactcacaggacaaatacaccaaggagaaggaagggaagaaataaagaaatccaggacctggaggagagctttgtgcctgttgctgcacccctaggtcatccaagagagctgcagaagtactccagtgattctgagagccccagaggaactggcagtggtgcgttgccaagtggtcagaagctggaggagttgaaggcagaggagccagataacttcagcagcaaagtagtgcagaggggccgagagttctttgacagcaacgggaacttcctgtacagaatttgagtcggggcttggcttatggagatgcctcgtgaaacacagctgggcaagtattaatgtatatggaacagcctggatttaagtttgccttctgacctcatttccttcttgatcagtgaacactaacattttggggacaacttagtcaattggttttccttacaacaaaataaagtaaaatgtagcagtc

SEQ ID NO: 7893 - protein, 219 aa, Homo sapiens; identical to SEQ ID NO: 1096

SEQ ID NO: 7894 - DNA, 1763 bp, Homo sapiens
tacttccgctgctgtttcgtagccgactgctgaaggctggtttgcgtcgacatggcggttaccctgagtctcttgctgggcgggcgcgtttgcgccgccgtcactcgctgtgggttcgcgacccggggggtggcgggcccaggccctattggccgggagccggaccccgattccgactgggagccggaggaacgggagctgcaggaggtggagaggtaccggcttctccccgggccctcagcttgaagcagggcctcgtgccccggcgctccaggccgcgcccccttggcgccgggtgtcctgccgctgcttgcgcagcggcccttgtttcttcttacccgttgttaggggcgcagcgtcaggtgttcagctcccctgggaccactggtcccttcattagtgacgtatttcatcatcagtttagagagttcggcatgcttacaggcagttattgttctaggtgttagctttctgggtgtacggagcagctctaagccggcaacatggcccggttgcccttgcgatcaaagagaagagggctgggcgctccatgatttagcctgaggctcttcaaacatccattctgcttccacgcatggcttctgccattggttctcttcccccagcaccctgaaacgacagaaacaagcaatccgattccagaaaattcggaggcaaatggaggcgcctggtgccccgcccaggaccctgacgtgggaagccatggagcagatacggtatttacatgaggaatttccagagtcctggtcagttcccaggttggctgaaggctttgatgtcagcactgatgtgatccgaagagttttaaaaagcaagtttttacccacattggagcagaagctgaagcaggatcaaaaagtccttaagaaagctgggcttgcccactcgctgcagcacctccggggctctggaaatacctcaaagctgctccctgcaggccactctgtatcaggctctttgcttatgccagggcatgaagcctcatctaaagacccaaatcacagcacagctttgaaagtgatagagtcagacactcacaggacaaatacaccaaggagaaggaagggaagaaataaagaaatccaggacctggaggagagctttgtgcctgttgctgcacccctaggtcatccaagagagctgcagaagtactccagtgattctgagagccccagaggaactggcagtggtgcgttgccaagtggtcagaagctggaggagttgaaggcagaggagccagataacttcagcagcaaagtagtgcagaggggccgagagttctttgacagcaacgggaacttcctgtacagaatttgagtcggggcttggcttatggagatgcctcgtgaaacacagctgggcaagtattaatgtatatggaacagcctggatttctgcatatggataagccaccttggaataggaagaggtgttgagcctggactgtgggaggaaagagctgcgtggatagattcaaacttcctgtggtagtgctcccagtctgacctctgtagaccttcagtactcactcttcttgcttaggctctctgtgtgttgaaagccatcccgtgttgcatgtgttgttacaattttctgtgatacttgcaatttatgtttgagaagaagtgaaaagtttgccttctgacctcatttccttcttgatcagtgaacactaacattttggggacaacttagtcaattggttttccttacaacaaaataaagtaaaatgtagcagtctg

SEQ ID NO: 7895 - protein, 219 aa, Homo sapiens; identical to SEQ ID NO: 1096

SEQ ID NO: 7896 - DNA, 1353 bp, Homo sapiens
tacttccgctgctgtttcgtagccgactgctgaaggctggtttgcgtcgacatggcggttaccctgagtctcttgctgggcgggcgcgtttgcgccgccgtcactcgctgtgggttcgcgacccggggggtggcgggcccaggccctattggccgggagccggaccccgattccgactgggagccggaggaacgggagctgcaggaggtggagaggtaccggcttctccccgggccctcagcttgaagcagggcctcgtgccccggcgctccaggccgcgcccccttggcgccgggtgtcctgccgctgcttgcgcagcggcccttgtttcttcttacccgttgttaggggcgcagcgtcaggtgttcagctcccctgggaccactggtcccttcattagtgacgtatttcatcatcagtttagagagttcggcatgcttacaggcagttattgttctaggtgttagctttctgggtgtacggagcagctctaagccggcaacatggcccggttgcccttgcgatcaaagagaagagggctgggcgctccatgatttagcctgaggctcttcaaacatccattctgcttccacgcatggcttctgccattggttctcttcccccagcaccctgaaacgacagaaacaagcaatccgattccagaaaattcggaggcaaatggaggcgcctggtgccccgcccaggaccctgacgtgggaagccatggagcagatacggtcatccaagagagctgcagaagtactccagtgattctgagagccccagaggaactggcagtggtgcgttgccaagtggtcagaagctggaggagttgaaggcagaggagccagataacttcagcagcaaagtagtgcagaggggccgagagttctttgacagcaacgggaacttcctgtacagaatttgagtcggggcttggcttatggagatgcctcgtgaaacacagctgggcaagtattaatgtatatggaacagcctggatttctgcatatggataagccaccttggaataggaagaggtgttgagcctggactgtgggaggaaagagctgcgtggatagattcaaacttcctgtggtagtgctcccagtctgacctctgtagaccttcagtactcactcttcttgcttaggctctctgtgtgttgaaagccatcccgtgttgcatgtgttgttacaattttctgtgatacttgcaatttatgtttgagaagaagtgaaaagtttgccttctgacctcatttccttcttgatcagtgaacactaacattttggggacaacttagtcaattggttttccttacaacaaaataaagtaaaatgtagcagtctg

SEQ ID NO: 7897 - protein, 30 aa, Homo sapiens; identical to SEQ ID NO: 7885

SEQ ID NO: 7898 - DNA, 1258 bp, Homo sapiens
acttccgctgctgtttcgtagccgactgctgaaggctggtttgcgtcgacatggcggttaccctgagtctcttgctgggcgggcgcgtttgcgccgccgtcactcgctgtgggttcgcgacccggggggtggcgggcccaggccctattggccgggagccggaccccgattccgactgggagccggaggaacgggagctgcaggaggtggagagcaccctgaaacgacagaaacaagcaatccgattccagaaaattcggaggcaaatggaggcgcctggtgccccgcccaggaccctgacgtgggaagccatggagcagatacggtatttacatgaggaatttccagagtcctggtcagttcccaggttggctgaaggctttgatgtcagcactgatgtgatccgaagagttttaaaaagcaagtttttacccacattggagcagaagctgaagcaggatcaaaaagtccttaagaaagctgggcttgcccactcgctgcagcacctccggggctctggaaatacctcaaagctgctccctgcaggccactctgtatcaggctctttgcttatgccagggcatgaagcctcatctaaagacccaaatcacagcacagctttgaaagtgatagagtcagacactcacaggacaaatacaccaaggagaaggaagggaagaaataaagaaatccaggacctggaggagagctttgtgcctgttgctgcacccctaggtcatccaagagagctgcagaagtactccagtgattctgagagccccagaggaactggcagtggtgcgttgccaagtggtcagaagctggaggagttgaaggcagaggagccagataacttcagcagcaaagtagtgcagaggggccgagagttctttgacagcaacgggaacttcctgtacagaatttgagtcggggcttggcttatggagatgcctcgtgaaacacagctgggcaagtattaatgtatatggaacagcctggatttctgcatatggataagccaccttggaataggaagaggtgttgagcctggactgtgggaggaaagagctgcgtggatagattcaaacttcctgtggtagtgctcccagtctgacctctgtagaccttcagtactcactcttcttgcttaggctctctgtgtgttgaaagccatcccgtgttgcatgtgttgttacaattttctgtgatacttgcaatttatgtttgagaagaagtgaaaagtttgccttctgacctc

SEQ ID NO: 7899 - protein, 291 aa, Homo sapiens; identical to SEQ ID NO: 1094

SEQ ID NO: 7900 - DNA, 1585 bp, Homo sapiens
acttccgctgctgtttcgtagccgactgctgaaggctggtttgcgtcgacatggcggttaccctgagtctcttgctgggcgggcgcgtttgcgccgccgtcactcgctgtgggttcgcgacccggggggtggcgggcccaggccctattggccgggagccggaccccgattccgactgggagccggaggaacgggagctgcaggaggtggagaggtaccggcttctccccgggccctcagcttgaagcagggcctcgtgccccggcgctccaggccgcgcccccttggcgccgggaccactggtcccttcattagtgacgtatttcatcatcagtttagagagttcggcatgcttacaggcagttattgttctaggtgttagctttctgggtgtacggagcagctctaagccggcaacatggcccggttgcccttgcgatcaaagagaagagggctgggcgctccatgatttagcctgaggctcttcaaacatccattctgcttccacgcatggcttctgccattggttctcttcccccagcaccctgaaacgacagaaacaagcaatccgattccagaaaattcggaggcaaatggaggcgcctggtgccccgcccaggaccctgacgtgggaagccatggagcagatacggtatttacatgaggaatttccagagtcctggtcagttcccaggttggctgaaggctttgatgtcagcactgatgtgatccgaagagttttaaaaagcaagtttttacccacattggagcagaagctgaagcaggatcaaaaagtccttaagaaagctgggcttgcccactcgctgcagcacctccggggctctggaaatacctcaaagctgctccctgcaggccactctgtatcaggctctttgcttatgccagggcatgaagcctcatctaaagacccaaatcacagcacagctttgaaagtgatagagtcagacactcacaggacaaatacaccaaggagaaggaagggaagaaataaagaaatccaggacctggaggagagctttgtgcctgttgctgcacccctaggtcatccaagagagctgcagaagtactccagtgattctgagagccccagaggaactggcagtggtgcgttgccaagtggtcagaagctggaggagttgaaggcagaggagccagataacttcagcagcaaagtagtgcagaggggccgagagttctttgacagcaacgggaacttcctgtacagaatttgagtcggggcttggcttatggagatgcctcgtgaaacacagctgggcaagtattaatgtatatggaacagcctggatttctgcatatggataagccaccttggaataggaagaggtgttgagcctggactgtgggaggaaagagctgcgtggatagattcaaacttcctgtggtagtgctcccagtctgacctctgtagaccttcagtactcactcttcttgcttaggctctctgtgtgttgaaagccatcccgtgttgcatgtgttgttacaattttctgtgatacttgcaatttatgtttgagaagaagtgaaaagtttgccttctgacctc

SEQ ID NO: 7901 - protein, 219 aa, Homo sapiens; identical to SEQ ID NO: 1096

SEQ ID NO: 7902 - DNA, 1147 bp, Homo sapiens
acttccgctgctgtttcgtagccgactgctgaaggctggtttgcgtcgacatggcggttaccctgagtctcttgctgggcgggcgcgtttgcgccgccgtcactcgctgtgggttcgcgacccggggggtggcgggcccaggccctattggccgggagccggaccccgattccgactgggagccggaggaacgggagctgcaggaggtggagaggtatttacatgaggaatttccagagtcctggtcagttcccaggttggctgaaggctttgatgtcagcactgatgtgatccgaagagttttaaaaagcaagtttttacccacattggagcagaagctgaagcaggatcaaaaagtccttaagaaagctgggcttgcccactcgctgcagcacctccggggctctggaaatacctcaaagctgctccctgcaggccactctgtatcaggctctttgcttatgccagggcatgaagcctcatctaaagacccaaatcacagcacagctttgaaagtgatagagtcagacactcacaggacaaatacaccaaggagaaggaagggaagaaataaagaaatccaggacctggaggagagctttgtgcctgttgctgcacccctaggtcatccaagagagctgcagaagtactccagtgattctgagagccccagaggaactggcagtggtgcgttgccaagtggtcagaagctggaggagttgaaggcagaggagccagataacttcagcagcaaagtagtgcagaggggccgagagttctttgacagcaacgggaacttcctgtacagaatttgagtcggggcttggcttatggagatgcctcgtgaaacacagctgggcaagtattaatgtatatggaacagcctggatttctgcatatggataagccaccttggaataggaagaggtgttgagcctggactgtgggaggaaagagctgcgtggatagattcaaacttcctgtggtagtgctcccagtctgacctctgtagaccttcagtactcactcttcttgcttaggctctctgtgtgttgaaagccatcccgtgttgcatgtgttgttacaattttctgtgatacttgcaatttatgtttgagaagaagtgaaaagtttgccttctgacctc

SEQ ID NO: 7903 - protein, 254 aa, Homo sapiens
MAVTLSLLLGGRVCAAVTRCGFATRGVAGPGPIGREPDPDSDWEPEERELQEVERYLHEEFPESWSVPRLAEGFDVSTDVIRRVLKSKFLPTLEQKLKQDQKVLKKAGLAHSLQHLRGSGNTSKLLPAGHSVSGSLLMPGHEASSKDPNHSTALKVIESDTHRTNTPRRRKGRNKEIQDLEESFVPVAAPLGHPRELQKYSSDSESPRGTGSGALPSGQKLEELKAEEPDNFSSKVVQRGREFFDSNGNFLYRI

SEQ ID NO: 7904 - DNA, 1351 bp, Homo sapiens
acttccgctgctgtttcgtagccgactgctgaaggctggtttgcgtcgacatggcggttaccctgagtctcttgctgggcgggcgcgtttgcgccgccgtcactcgctgtgggttcgcgacccggggggtggcgggcccaggccctattggccgggagccggaccccgattccgactgggagccggaggaacgggagctgcaggaggtggagagcaccctgaaacgacagaaacaagcaatccgattccagaaaattcggaggcaaatggaggcgcctggtgccccgcccaggaccctgacgtgggaagccatggagcagatacggtatttacatgaggaatttccagagtcctggtcagttcccaggttggctgaaggctttgatgtcagcactgatgtgatccgaagagttttaaaaagcaagtttttacccacattggagcagaagctgaagcaggatcaaaaagtccttaagaaagctgggcttgcccactcgctgcagcacctccggggctctggaaatacctcaaagctgctccctgcaggccactctgtatcaggctctttgcttatgccagggcatgaagcctcatctaaagacccaaatcacagcacagctttgaaagtgatagagtcagacactcacaggacaaatacaccaaggagaaggaagggaagaaataaagaaatccaggacctggaggagagctttgtgcctgttgctgcacccctaggtcatccaagagagctgcagaagtactccagtgattctgagagccccagaggaactggcagtggtgcgttgccaagtggtcagaagctggaggagttgaaggcagaggagccagataacttcagcagcaaagtagtgcagaggggccgagagttctttgacagcaacgggaacttcctgtacagaatttgagtcggggcttggcttatggagatgcctcgtgaaacacagctgggcaagtattaatgtatatggaacagcctggatttctgcatatggataagccaccttggaataggaagaggtgttgagcctggactgtgggaggaaagagctgcgtggatagattcaaacttcctgtggtagtgctcccagtctgacctctgtagaccttcagtactcactcttcttgcttaggctctctgtgtgttgaaagccatcccgtgttgcatgtgttgttacaattttctgtgatacttgcaatttatgtttgagaagaagtgaaaagtttgccttctgacctcatttccttcttgatcagtgaacactaacattttggggacaacttagtcaattggttttccttacaacaaaataaagtaaaatgtagcagtctg

SEQ ID NO: 7905 - protein, 291 aa, Homo sapiens; identical to SEQ ID NO: 1094

SEQ ID NO: 7906 - DNA, 1678 bp, Homo sapiens
acttccgctgctgtttcgtagccgactgctgaaggctggtttgcgtcgacatggcggttaccctgagtctcttgctgggcgggcgcgtttgcgccgccgtcactcgctgtgggttcgcgacccggggggtggcgggcccaggccctattggccgggagccggaccccgattccgactgggagccggaggaacgggagctgcaggaggtggagaggtaccggcttctccccgggccctcagcttgaagcagggcctcgtgccccggcgctccaggccgcgcccccttggcgccgggaccactggtcccttcattagtgacgtatttcatcatcagtttagagagttcggcatgcttacaggcagttattgttctaggtgttagctttctgggtgtacggagcagctctaagccggcaacatggcccggttgcccttgcgatcaaagagaagagggctgggcgctccatgatttagcctgaggctcttcaaacatccattctgcttccacgcatggcttctgccattggttctcttcccccagcaccctgaaacgacagaaacaagcaatccgattccagaaaattcggaggcaaatggaggcgcctggtgccccgcccaggaccctgacgtgggaagccatggagcagatacggtatttacatgaggaatttccagagtcctggtcagttcccaggttggctgaaggctttgatgtcagcactgatgtgatccgaagagttttaaaaagcaagtttttacccacattggagcagaagctgaagcaggatcaaaaagtccttaagaaagctgggcttgcccactcgctgcagcacctccggggctctggaaatacctcaaagctgctccctgcaggccactctgtatcaggctctttgcttatgccagggcatgaagcctcatctaaagacccaaatcacagcacagctttgaaagtgatagagtcagacactcacaggacaaatacaccaaggagaaggaagggaagaaataaagaaatccaggacctggaggagagctttgtgcctgttgctgcacccctaggtcatccaagagagctgcagaagtactccagtgattctgagagccccagaggaactggcagtggtgcgttgccaagtggtcagaagctggaggagttgaaggcagaggagccagataacttcagcagcaaagtagtgcagaggggccgagagttctttgacagcaacgggaacttcctgtacagaatttgagtcggggcttggcttatggagatgcctcgtgaaacacagctgggcaagtattaatgtatatggaacagcctggatttctgcatatggataagccaccttggaataggaagaggtgttgagcctggactgtgggaggaaagagctgcgtggatagattcaaacttcctgtggtagtgctcccagtctgacctctgtagaccttcagtactcactcttcttgcttaggctctctgtgtgttgaaagccatcccgtgttgcatgtgttgttacaattttctgtgatacttgcaatttatgtttgagaagaagtgaaaagtttgccttctgacctcatttccttcttgatcagtgaacactaacattttggggacaacttagtcaattggttttccttacaacaaaataaagtaaaatgtagcagtctg

SEQ ID NO: 7907 - protein, 219 aa, Homo sapiens; identical to SEQ ID NO: 1096

SEQ ID NO: 7908 - DNA, 1240 bp, Homo sapiens
acttccgctgctgtttcgtagccgactgctgaaggctggtttgcgtcgacatggcggttaccctgagtctcttgctgggcgggcgcgtttgcgccgccgtcactcgctgtgggttcgcgacccggggggtggcgggcccaggccctattggccgggagccggaccccgattccgactgggagccggaggaacgggagctgcaggaggtggagaggtatttacatgaggaatttccagagtcctggtcagttcccaggttggctgaaggctttgatgtcagcactgatgtgatccgaagagttttaaaaagcaagtttttacccacattggagcagaagctgaagcaggatcaaaaagtccttaagaaagctgggcttgcccactcgctgcagcacctccggggctctggaaatacctcaaagctgctccctgcaggccactctgtatcaggctctttgcttatgccagggcatgaagcctcatctaaagacccaaatcacagcacagctttgaaagtgatagagtcagacactcacaggacaaatacaccaaggagaaggaagggaagaaataaagaaatccaggacctggaggagagctttgtgcctgttgctgcacccctaggtcatccaagagagctgcagaagtactccagtgattctgagagccccagaggaactggcagtggtgcgttgccaagtggtcagaagctggaggagttgaaggcagaggagccagataacttcagcagcaaagtagtgcagaggggccgagagttctttgacagcaacgggaacttcctgtacagaatttgagtcggggcttggcttatggagatgcctcgtgaaacacagctgggcaagtattaatgtatatggaacagcctggatttctgcatatggataagccaccttggaataggaagaggtgttgagcctggactgtgggaggaaagagctgcgtggatagattcaaacttcctgtggtagtgctcccagtctgacctctgtagaccttcagtactcactcttcttgcttaggctctctgtgtgttgaaagccatcccgtgttgcatgtgttgttacaattttctgtgatacttgcaatttatgtttgagaagaagtgaaaagtttgccttctgacctcatttccttcttgatcagtgaacactaacattttggggacaacttagtcaattggttttccttacaacaaaataaagtaaaatgtagcagtctg

SEQ ID NO: 7909 - protein, 254 aa, Homo sapiens; identical to SEQ ID NO: 7903

SEQ ID NO: 7910 - DNA, 1468 bp, Homo sapiens
acttccgctgctgtttcgtagccgactgctgaaggctggtttgcgtcgacatggcggttaccctgagtctcttgctgggcgggcgcgtttgcgccgccgtcactcgctgtgggttcgcgacccggggggtggcgggcccaggccctattggccgggagccggaccccgattccgactgggagccggaggaacgggagctgcaggaggtggagagcaccctgaaacgacagaaacaagcaatccgattccagaaaattcggaggcaaatggaggcgcctggtgccccgcccaggaccctgacgtgggaagccatggagcagatacggtatttacatgaggaatttccagagtcctggtcagttcccaggttggctgaaggctttgatgtcagcactgatgtgatccgaagagttttaaaaagcaagtttttacccacattggagcagaagctgaagcaggatcaaaaagtccttaagaaagctgggcttgcccactcgctgcagcacctccggggctctggaaatacctcaaagctgctccctgcaggccactctgtatcaggctctttgcttatgccagggcatgaagcctcatctaaagacccaaatcacagcacagctttgaaagtgatagagtcagacactcacaggacaaatacaccaaggagaaggaagggaagaaataaagaaatccaggacctggaggagagctttgtgcctgttgctgcacccctaggtcatccaagagagctgcagaagtactccagtgattctgagagccccagaggaactggcagtggtgcgttgccaagtggtcagaagctggaggagttgaaggcagaggagccagataacttcagcagcaaagtagtgcagaggggccgagagttctttgacagcaacgggaacttcctgtacagaatttgagtcggggcttggcttatggagatgcctcgtgaaacacagctgggcaagtattaatgtatatggaacagcctggatttctgcatatggataagccaccttggaataggaagaggtgttgagcctggactgtgggaggaaagagctgcgtggatagattcaaacttcctgtggtagtgctcccagtctgacctctgtagaccttcagtactcactcttcttgcttaggctctctgtgtgttgaaagccatcccgtgttgcatgtgttgttacaattttctgtgatacttgcaatttatgtttgagaagaagtgaaaagtttgccttctgacctcatttccttcttgatcagtgaacactaacattttggggacaacttagtcaattggttttccttacaacaaaataaagtaaaatgtagcagtctgcctctttggtgctctttggggtgggatggtttacctgtgaaccttggagagagggaaggacaaaggcagaaaggaaggatccctggtcagtaaacattgggagagagatggaaccag

SEQ ID NO: 7911 - protein, 291 aa, Homo sapiens; identical to SEQ ID NO: 1094

SEQ ID NO: 7912 - DNA, 1795 bp, Homo sapiens
acttccgctgctgtttcgtagccgactgctgaaggctggtttgcgtcgacatggcggttaccctgagtctcttgctgggcgggcgcgtttgcgccgccgtcactcgctgtgggttcgcgacccggggggtggcgggcccaggccctattggccgggagccggaccccgattccgactgggagccggaggaacgggagctgcaggaggtggagaggtaccggcttctccccgggccctcagcttgaagcagggcctcgtgccccggcgctccaggccgcgcccccttggcgccgggaccactggtcccttcattagtgacgtatttcatcatcagtttagagagttcggcatgcttacaggcagttattgttctaggtgttagctttctgggtgtacggagcagctctaagccggcaacatggcccggttgcccttgcgatcaaagagaagagggctgggcgctccatgatttagcctgaggctcttcaaacatccattctgcttccacgcatggcttctgccattggttctcttcccccagcaccctgaaacgacagaaacaagcaatccgattccagaaaattcggaggcaaatggaggcgcctggtgccccgcccaggaccctgacgtgggaagccatggagcagatacggtatttacatgaggaatttccagagtcctggtcagttcccaggttggctgaaggctttgatgtcagcactgatgtgatccgaagagttttaaaaagcaagtttttacccacattggagcagaagctgaagcaggatcaaaaagtccttaagaaagctgggcttgcccactcgctgcagcacctccggggctctggaaatacctcaaagctgctccctgcaggccactctgtatcaggctctttgcttatgccagggcatgaagcctcatctaaagacccaaatcacagcacagctttgaaagtgatagagtcagacactcacaggacaaatacaccaaggagaaggaagggaagaaataaagaaatccaggacctggaggagagctttgtgcctgttgctgcacccctaggtcatccaagagagctgcagaagtactccagtgattctgagagccccagaggaactggcagtggtgcgttgccaagtggtcagaagctggaggagttgaaggcagaggagccagataacttcagcagcaaagtagtgcagaggggccgagagttctttgacagcaacgggaacttcctgtacagaatttgagtcggggcttggcttatggagatgcctcgtgaaacacagctgggcaagtattaatgtatatggaacagcctggatttctgcatatggataagccaccttggaataggaagaggtgttgagcctggactgtgggaggaaagagctgcgtggatagattcaaacttcctgtggtagtgctcccagtctgacctctgtagaccttcagtactcactcttcttgcttaggctctctgtgtgttgaaagccatcccgtgttgcatgtgttgttacaattttctgtgatacttgcaatttatgtttgagaagaagtgaaaagtttgccttctgacctcatttccttcttgatcagtgaacactaacattttggggacaacttagtcaattggttttccttacaacaaaataaagtaaaatgtagcagtctgcctctttggtgctctttggggtgggatggtttacctgtgaaccttggagagagggaaggacaaaggcagaaaggaaggatccctggtcagtaaacattgggagagagatggaaccag

SEQ ID NO: 7913 - protein, 219 aa, Homo sapiens; identical to SEQ ID NO: 1096

SEQ ID NO: 7914 - DNA, 1357 bp, Homo sapiens
acttccgctgctgtttcgtagccgactgctgaaggctggtttgcgtcgacatggcggttaccctgagtctcttgctgggcgggcgcgtttgcgccgccgtcactcgctgtgggttcgcgacccggggggtggcgggcccaggccctattggccgggagccggaccccgattccgactgggagccggaggaacgggagctgcaggaggtggagaggtatttacatgaggaatttccagagtcctggtcagttcccaggttggctgaaggctttgatgtcagcactgatgtgatccgaagagttttaaaaagcaagtttttacccacattggagcagaagctgaagcaggatcaaaaagtccttaagaaagctgggcttgcccactcgctgcagcacctccggggctctggaaatacctcaaagctgctccctgcaggccactctgtatcaggctctttgcttatgccagggcatgaagcctcatctaaagacccaaatcacagcacagctttgaaagtgatagagtcagacactcacaggacaaatacaccaaggagaaggaagggaagaaataaagaaatccaggacctggaggagagctttgtgcctgttgctgcacccctaggtcatccaagagagctgcagaagtactccagtgattctgagagccccagaggaactggcagtggtgcgttgccaagtggtcagaagctggaggagttgaaggcagaggagccagataacttcagcagcaaagtagtgcagaggggccgagagttctttgacagcaacgggaacttcctgtacagaatttgagtcggggcttggcttatggagatgcctcgtgaaacacagctgggcaagtattaatgtatatggaacagcctggatttctgcatatggataagccaccttggaataggaagaggtgttgagcctggactgtgggaggaaagagctgcgtggatagattcaaacttcctgtggtagtgctcccagtctgacctctgtagaccttcagtactcactcttcttgcttaggctctctgtgtgttgaaagccatcccgtgttgcatgtgttgttacaattttctgtgatacttgcaatttatgtttgagaagaagtgaaaagtttgccttctgacctcatttccttcttgatcagtgaacactaacattttggggacaacttagtcaattggttttccttacaacaaaataaagtaaaatgtagcagtctgcctctttggtgctctttggggtgggatggtttacctgtgaaccttggagagagggaaggacaaaggcagaaaggaaggatccctggtcagtaaacattgggagagagatggaaccag

SEQ ID NO: 7915 - protein, 254 aa, Homo sapiens; identical to SEQ ID NO: 7903

SEQ ID NO: 7916 - DNA, 580 bp, Homo sapiens
acttccgctgctgtttcgtagccgactgctgaaggctggtttgcgtcgacatggcggttaccctgagtctcttgctgggcgggcgcgtttgcgccgccgtcactcgctgtgggttcgcgacccggggggtggcgggcccaggccctattggccgggagccggaccccgattccgactgggagccggaggaacgggagctgcaggaggtggagaggtaccggcttctccccgggccctcagcttgaagcagggcctcgtgccccggcgctccaggccgcgcccccttggcgccgggtgtcctgccgctgcttgcgcagcggcccttgtttcttcttacccgttgttaggggcgcagcgtcaggtgttcagctcccctgggaccactggtcccttcattagtgacgtatttcatcatcagtttagagagttcggcatgcttacaggcagttattgttctcttcccccagcaccctgaaacgacagaaacaagcaatccgattccagaaaattcggaggcaaatggaggcgcctggtgccccgcccaggaccctgacgtgggaagccatggagcagatacggt

SEQ ID NO: 7917 - protein, 64 aa, Homo sapiens; identical to SEQ ID NO: 7887

SEQ ID NO: 7918 - DNA, 892 bp, Homo sapiens
acttccgctgctgtttcgtagccgactgctgaaggctggtttgcgtcgacatggcggttaccctgagtctcttgctgggcgggcgcgtttgcgccgccgtcactcgctgtgggttcgcgacccggggggtggcgggcccaggccctattggccgggagccggaccccgattccgactgggagccggaggaacgggagctgcaggaggtggagaggtaccggcttctccccgggccctcagcttgaagcagggcctcgtgccccggcgctccaggccgcgcccccttggcgccgggtgtcctgccgctgcttgcgcagcggcccttgtttcttcttacccgttgttaggggcgcagcgtcaggtgttcagctcccctgggaccactggtcccttcattagtgacgtatttcatcatcagtttagagaagttctttgacagcaacgggaacttcctgtacagaatttgagtcggggcttggcttatggagatgcctcgtgaaacacagctgggcaagtattaatgtatatggaacagcctggatttctgcatatggataagccaccttggaataggaagaggtgttgagcctggactgtgggaggaaagagctgcgtggatagattcaaacttcctgtggtagtgctcccagtctgacctctgtagaccttcagtactcactcttcttgcttaggctctctgtgtgttgaaagccatcccgtgttgcatgtgttgttacaattttctgtgatacttgcaatttatgtttgagaagaagtgaaaagtttgccttctgacctcatttccttcttgatcagtgaacactaacattttggggacaacttagtcaattggttttccttacaacaaaataaagtaaaatgtagcagtctg

SEQ ID NO: 7919 - protein, 64 aa, Homo sapiens; identical to SEQ ID NO: 7887

SEQ ID NO: 7920 - DNA, 1009 bp, Homo sapiens
acttccgctgctgtttcgtagccgactgctgaaggctggtttgcgtcgacatggcggttaccctgagtctcttgctgggcgggcgcgtttgcgccgccgtcactcgctgtgggttcgcgacccggggggtggcgggcccaggccctattggccgggagccggaccccgattccgactgggagccggaggaacgggagctgcaggaggtggagaggtaccggcttctccccgggccctcagcttgaagcagggcctcgtgccccggcgctccaggccgcgcccccttggcgccgggtgtcctgccgctgcttgcgcagcggcccttgtttcttcttacccgttgttaggggcgcagcgtcaggtgttcagctcccctgggaccactggtcccttcattagtgacgtatttcatcatcagtttagagaagttctttgacagcaacgggaacttcctgtacagaatttgagtcggggcttggcttatggagatgcctcgtgaaacacagctgggcaagtattaatgtatatggaacagcctggatttctgcatatggataagccaccttggaataggaagaggtgttgagcctggactgtgggaggaaagagctgcgtggatagattcaaacttcctgtggtagtgctcccagtctgacctctgtagaccttcagtactcactcttcttgcttaggctctctgtgtgttgaaagccatcccgtgttgcatgtgttgttacaattttctgtgatacttgcaatttatgtttgagaagaagtgaaaagtttgccttctgacctcatttccttcttgatcagtgaacactaacattttggggacaacttagtcaattggttttccttacaacaaaataaagtaaaatgtagcagtctgcctctttggtgctctttggggtgggatggtttacctgtgaaccttggagagagggaaggacaaaggcagaaaggaaggatccctggtcagtaaacattgggagagagatggaaccag

SEQ ID NO: 7921 - protein, 64 aa, Homo sapiens; identical to SEQ ID NO: 7887

SEQ ID NO: 7922 - DNA, 1013 bp, Homo sapiens
gctgtttcgtagccgactgctgaaggctggtttgcgtcgacatggcggaccctgacgtgggaagccatggagcagatacggtatttacatgaggaatttccagagtcctggtcagttcccaggttggctgaaggctttgatgtcagcactgatgtgatccgaagagttttaaaaagcaagtttttacccacattggagcagaagctgaagcaggatcaaaaagtccttaagaaagctgggcttgcccactcgctgcagcacctccggggctctggaaatacctcaaagctgctccctgcaggccactctgtatcaggctctttgcttatgccagggcatgaagcctcatctaaagacccaaatcacagcacagctttgaaagtgatagagtcagacactcacaggacaaatacaccaaggagaaggaagggaagaaataaagaaatccaggacctggaggagagctttgtgcctgttgctgcacccctaggtcatccaagagagctgcagaagtactccagtgattctgagagccccagaggaactggcagtggtgcgttgccaagtggtcagaagctggaggagttgaaggcagaggagccagataacttcagcagcaaagtagtgcagaggggccgagagttctttgacagcaacgggaacttcctgtacagaatttgagtcggggcttggcttatggagatgcctcgtgaaacacagctgggcaagtattaatgtatatggaacagcctggatttctgcatatggataagccaccttggaataggaagaggtgttgagcctggactgtgggaggaaagagctgcgtggatagattcaaacttcctgtggtagtgctcccagtctgacctctgtagaccttcagtactcactcttcttgcttaggctctctgtgtgttgaaagccatcccgtgttgcatgtgttgttacaattttctgtgatacttgcaatttatgtttgagaagaagtgaaaagtttgccttctgacctc

SEQ ID NO: 7923 - protein, 204 aa, Homo sapiens [sequence omitted]

SEQ ID NO: 7924 - DNA, 1106 bp, Homo sapiens
gctgtttcgtagccgactgctgaaggctggtttgcgtcgacatggcggaccctgacgtgggaagccatggagcagatacggtatttacatgaggaatttccagagtcctggtcagttcccaggttggctgaaggctttgatgtcagcactgatgtgatccgaagagttttaaaaagcaagtttttacccacattggagcagaagctgaagcaggatcaaaaagtccttaagaaagctgggcttgcccactcgctgcagcacctccggggctctggaaatacctcaaagctgctccctgcaggccactctgtatcaggctctttgcttatgccagggcatgaagcctcatctaaagacccaaatcacagcacagctttgaaagtgatagagtcagacactcacaggacaaatacaccaaggagaaggaagggaagaaataaagaaatccaggacctggaggagagctttgtgcctgttgctgcacccctaggtcatccaagagagctgcagaagtactccagtgattctgagagccccagaggaactggcagtggtgcgttgccaagtggtcagaagctggaggagttgaaggcagaggagccagataacttcagcagcaaagtagtgcagaggggccgagagttctttgacagcaacgggaacttcctgtacagaatttgagtcggggcttggcttatggagatgcctcgtgaaacacagctgggcaagtattaatgtatatggaacagcctggatttctgcatatggataagccaccttggaataggaagaggtgttgagcctggactgtgggaggaaagagctgcgtggatagattcaaacttcctgtggtagtgctcccagtctgacctctgtagaccttcagtactcactcttcttgcttaggctctctgtgtgttgaaagccatcccgtgttgcatgtgttgttacaattttctgtgatacttgcaatttatgtttgagaagaagtgaaaagtttgccttctgacctcatttccttcttgatcagtgaacactaacattttggggacaacttagtcaattggttttccttacaacaaaataaagtaaaatgtagcagtctg

SEQ ID NO: 7925 - protein, 204 aa, Homo sapiens [sequence omitted]

SEQ ID NO: 7926 - DNA, 1223 bp, Homo sapiens
gctgtttcgtagccgactgctgaaggctggtttgcgtcgacatggcggaccctgacgtgggaagccatggagcagatacggtatttacatgaggaatttccagagtcctggtcagttcccaggttggctgaaggctttgatgtcagcactgatgtgatccgaagagttttaaaaagcaagtttttacccacattggagcagaagctgaagcaggatcaaaaagtccttaagaaagctgggcttgcccactcgctgcagcacctccggggctctggaaatacctcaaagctgctccctgcaggccactctgtatcaggctctttgcttatgccagggcatgaagcctcatctaaagacccaaatcacagcacagctttgaaagtgatagagtcagacactcacaggacaaatacaccaaggagaaggaagggaagaaataaagaaatccaggacctggaggagagctttgtgcctgttgctgcacccctaggtcatccaagagagctgcagaagtactccagtgattctgagagccccagaggaactggcagtggtgcgttgccaagtggtcagaagctggaggagttgaaggcagaggagccagataacttcagcagcaaagtagtgcagaggggccgagagttctttgacagcaacgggaacttcctgtacagaatttgagtcggggcttggcttatggagatgcctcgtgaaacacagctgggcaagtattaatgtatatggaacagcctggatttctgcatatggataagccaccttggaataggaagaggtgttgagcctggactgtgggaggaaagagctgcgtggatagattcaaacttcctgtggtagtgctcccagtctgacctctgtagaccttcagtactcactcttcttgcttaggctctctgtgtgttgaaagccatcccgtgttgcatgtgttgttacaattttctgtgatacttgcaatttatgtttgagaagaagtgaaaagtttgccttctgacctcatttccttcttgatcagtgaacactaacattttggggacaacttagtcaattggttttccttacaacaaaataaagtaaaatgtagcagtctgcctctttggtgctctttggggtgggatggtttacctgtgaaccttggagagagggaaggacaaaggcagaaaggaaggatccctggtcagtaaacattgggagagagatggaaccag

SEQ ID NO: 7927 - protein, 204 aa, Homo sapiens [sequence omitted]

SEQ ID NO: 7928 - DNA, 1378 bp, Homo sapiens
gccgactgctgaaggctggtttgcgtcgacatggcggttaccctgagtctcttgctgggcgggcgcgtttgcgccgccgtcactcgctgtgggttcgcgacccggggggtggcgggcccaggccctattggccgggagccggaccccgattccgactgggagccggaggaacgggagctgcaggaggtggagaggtaccggcttctccccgggccctcagcttgaagcagggcctcgtgccccggcgctccaggccgcgcccccttggcgccgggtgtcctgccgctgcttgcgcagcggcccttgtttcttcttacccgttgttaggggcgcagcgtcaggtgttcagctcccctgggaccactggtcccttcattagtgacgtatttcatcatcagtttagagagttcggcatgcttacaggcagttattgttctaggtgttagctttctgggtgtacggagcagctctaagccggcaacatggcccggttgcccttgcgatcaaagagaagagggctgggcgctccatgatttagcctgaggctcttcaaacatccattctgcttccacgcatggcttctgccattggttctcttcccccagcaccatgaagcctcatctaaagacccaaatcacagcacagctttgaaagtgatagagtcagacactcacaggacaaatacaccaaggagaaggaagggaagaaataaagaaatccaggacctggaggagagctttgtgcctgttgctgcacccctaggtcatccaagagagctgcagaagtactccagtgattctgagagccccagaggaactggcagtggtgcgttgccaagtggtcagaagctggaggagttgaaggcagaggagccagataacttcagcagcaaagtagtgcagaggggccgagagttctttgacagcaacgggaacttcctgtacagaatttgagtcggggcttggcttatggagatgcctcgtgaaacacagctgggcaagtattaatgtatatggaacagcctggatttctgcatatggataagccaccttggaataggaagaggtgttgagcctggactgtgggaggaaagagctgcgtggatagattcaaacttcctgtggtagtgctcccagtctgacctctgtagaccttcagtactcactcttcttgcttaggctctctgtgtgttgaaagccatcccgtgttgcatgtgttgttacaattttctgtgatacttgcaatttatgtttgagaagaagtgaaaagtttgccttctgacctcatttccttcttgatcagtgaacactaacattttggggacaacttagtcaattggttttccttacaacaaaataaagtaaaatgtagcagtctg

SEQ ID NO: 7929 - protein, 64 aa, Homo sapiens; identical to SEQ ID NO: 7887

SEQ ID NO: 7930 - DNA, 1495 bp, Homo sapiens
gccgactgctgaaggctggtttgcgtcgacatggcggttaccctgagtctcttgctgggcgggcgcgtttgcgccgccgtcactcgctgtgggttcgcgacccggggggtggcgggcccaggccctattggccgggagccggaccccgattccgactgggagccggaggaacgggagctgcaggaggtggagaggtaccggcttctccccgggccctcagcttgaagcagggcctcgtgccccggcgctccaggccgcgcccccttggcgccgggtgtcctgccgctgcttgcgcagcggcccttgtttcttcttacccgttgttaggggcgcagcgtcaggtgttcagctcccctgggaccactggtcccttcattagtgacgtatttcatcatcagtttagagagttcggcatgcttacaggcagttattgttctaggtgttagctttctgggtgtacggagcagctctaagccggcaacatggcccggttgcccttgcgatcaaagagaagagggctgggcgctccatgatttagcctgaggctcttcaaacatccattctgcttccacgcatggcttctgccattggttctcttcccccagcaccatgaagcctcatctaaagacccaaatcacagcacagctttgaaagtgatagagtcagacactcacaggacaaatacaccaaggagaaggaagggaagaaataaagaaatccaggacctggaggagagctttgtgcctgttgctgcacccctaggtcatccaagagagctgcagaagtactccagtgattctgagagccccagaggaactggcagtggtgcgttgccaagtggtcagaagctggaggagttgaaggcagaggagccagataacttcagcagcaaagtagtgcagaggggccgagagttctttgacagcaacgggaacttcctgtacagaatttgagtcggggcttggcttatggagatgcctcgtgaaacacagctgggcaagtattaatgtatatggaacagcctggatttctgcatatggataagccaccttggaataggaagaggtgttgagcctggactgtgggaggaaagagctgcgtggatagattcaaacttcctgtggtagtgctcccagtctgacctctgtagaccttcagtactcactcttcttgcttaggctctctgtgtgttgaaagccatcccgtgttgcatgtgttgttacaattttctgtgatacttgcaatttatgtttgagaagaagtgaaaagtttgccttctgacctcatttccttcttgatcagtgaacactaacattttggggacaacttagtcaattggttttccttacaacaaaataaagtaaaatgtagcagtctgcctctttggtgctctttggggtgggatggtttacctgtgaaccttggagagagggaaggacaaaggcagaaaggaaggatccctggtcagtaaacattgggagagagatggaaccag

SEQ ID NO: 7931 - protein, 64 aa, Homo sapiens; identical to SEQ ID NO: 7887

SEQ ID NO: 7932 - DNA, 1535 bp, Homo sapiens
actgctgaaggctggtttgcgtcgacatggcggttaccctgagtctcttgctgggcgggcgcgtttgcgccgccgtcactcgctgtgggttcgcgacccggggggtggcgggcccaggccctattggccgggagccggaccccgattccgactgggagccggaggaacgggagctgcaggaggtggagaggtaccggcttctccccgggccctcagcttgaagcagggcctcgtgccccggcgctccaggccgcgcccccttggcgccgggtgtcctgccgctgcttgcgcagcggcccttgtttcttcttacccgttgttaggggcgcagcgtcaggtgttcagctcccctgggaccactggtcccttcattagtgacgtatttcatcatcaagagaagagggctgggcgctccatgatttagcctgaggctcttcaaacatccattctgcttccacgcatggcttctgccattggttctcttcccccagcaccctgaaacgacagaaacaagcaatccgattccagaaaattcggaggcaaatggaggcgcctggtgccccgcccaggaccctgacgtgggaagccatggagcagatacggtatttacatgaggaatttccagagtcctggtcagttcccaggttggctgaaggctttgatgtcagcactgatgtgatccgaagagttttaaaaagcaagtttttacccacattggagcagaagctgaagcaggatcaaaaagtccttaagaaagctgggcttgcccactcgctgcagcacctccggggctctggaaatacctcaaagctgctccctgcaggccactctgtatcaggctctttgcttatgccagggcatgaagcctcatctaaagacccaaatcacagcacagctttgaaagtgatagagtcagacactcacaggacaaatacaccaaggagaaggaagggaagaaataaagaaatccaggacctggaggagagctttgtgcctgttgctgcacccctaggtcatccaagagagctgcagaagtactccagtgattctgagagccccagaggaactggcagtggtgcgttgccaagtggtcagaagctggaggagttgaaggcagaggagccagataacttcagcagcaaagtagtgcagaggggccgagagttctttgacagcaacgggaacttcctgtacagaatttgagtcggggcttggcttatggagatgcctcgtgaaacacagctgggcaagtattaatgtatatggaacagcctggatttctgcatatggataagccaccttggaataggaagaggtgttgagcctggactgtgggaggaaagagctgcgtggatagattcaaacttcctgtggtagtgctcccagtctgacctctgtagaccttcagtactcactcttcttgcttaggctctctgtgtgttgaaagccatcccgtgttgcatgtgttgttacaattttctgtgatacttgcaatttatgtttgagaagaagtgaaaagtttgccttctgacctc

SEQ ID NO: 7933 - protein, 219 aa, Homo sapiens; identical to SEQ ID NO: 1096

SEQ ID NO: 7934 - DNA, 1628 bp, Homo sapiens
actgctgaaggctggtttgcgtcgacatggcggttaccctgagtctcttgctgggcgggcgcgtttgcgccgccgtcactcgctgtgggttcgcgacccggggggtggcgggcccaggccctattggccgggagccggaccccgattccgactgggagccggaggaacgggagctgcaggaggtggagaggtaccggcttctccccgggccctcagcttgaagcagggcctcgtgccccggcgctccaggccgcgcccccttggcgccgggtgtcctgccgctgcttgcgcagcggcccttgtttcttcttacccgttgttaggggcgcagcgtcaggtgttcagctcccctgggaccactggtcccttcattagtgacgtatttcatcatcaagagaagagggctgggcgctccatgatttagcctgaggctcttcaaacatccattctgcttccacgcatggcttctgccattggttctcttcccccagcaccctgaaacgacagaaacaagcaatccgattccagaaaattcggaggcaaatggaggcgcctggtgccccgcccaggaccctgacgtgggaagccatggagcagatacggtatttacatgaggaatttccagagtcctggtcagttcccaggttggctgaaggctttgatgtcagcactgatgtgatccgaagagttttaaaaagcaagtttttacccacattggagcagaagctgaagcaggatcaaaaagtccttaagaaagctgggcttgcccactcgctgcagcacctccggggctctggaaatacctcaaagctgctccctgcaggccactctgtatcaggctctttgcttatgccagggcatgaagcctcatctaaagacccaaatcacagcacagctttgaaagtgatagagtcagacactcacaggacaaatacaccaaggagaaggaagggaagaaataaagaaatccaggacctggaggagagctttgtgcctgttgctgcacccctaggtcatccaagagagctgcagaagtactccagtgattctgagagccccagaggaactggcagtggtgcgttgccaagtggtcagaagctggaggagttgaaggcagaggagccagataacttcagcagcaaagtagtgcagaggggccgagagttctttgacagcaacgggaacttcctgtacagaatttgagtcggggcttggcttatggagatgcctcgtgaaacacagctgggcaagtattaatgtatatggaacagcctggatttctgcatatggataagccaccttggaataggaagaggtgttgagcctggactgtgggaggaaagagctgcgtggatagattcaaacttcctgtggtagtgctcccagtctgacctctgtagaccttcagtactcactcttcttgcttaggctctctgtgtgttgaaagccatcccgtgttgcatgtgttgttacaattttctgtgatacttgcaatttatgtttgagaagaagtgaaaagtttgccttctgacctcatttccttcttgatcagtgaacactaacattttggggacaacttagtcaattggttttccttacaacaaaataaagtaaaatgtagcagtctg

SEQ ID NO: 7935 - protein, 219 aa, Homo sapiens; identical to SEQ ID NO: 1096

SEQ ID NO: 7936 - DNA, 1745 bp, Homo sapiens
actgctgaaggctggtttgcgtcgacatggcggttaccctgagtctcttgctgggcgggcgcgtttgcgccgccgtcactcgctgtgggttcgcgacccggggggtggcgggcccaggccctattggccgggagccggaccccgattccgactgggagccggaggaacgggagctgcaggaggtggagaggtaccggcttctccccgggccctcagcttgaagcagggcctcgtgccccggcgctccaggccgcgcccccttggcgccgggtgtcctgccgctgcttgcgcagcggcccttgtttcttcttacccgttgttaggggcgcagcgtcaggtgttcagctcccctgggaccactggtcccttcattagtgacgtatttcatcatcaagagaagagggctgggcgctccatgatttagcctgaggctcttcaaacatccattctgcttccacgcatggcttctgccattggttctcttcccccagcaccctgaaacgacagaaacaagcaatccgattccagaaaattcggaggcaaatggaggcgcctggtgccccgcccaggaccctgacgtgggaagccatggagcagatacggtatttacatgaggaatttccagagtcctggtcagttcccaggttggctgaaggctttgatgtcagcactgatgtgatccgaagagttttaaaaagcaagtttttacccacattggagcagaagctgaagcaggatcaaaaagtccttaagaaagctgggcttgcccactcgctgcagcacctccggggctctggaaatacctcaaagctgctccctgcaggccactctgtatcaggctctttgcttatgccagggcatgaagcctcatctaaagacccaaatcacagcacagctttgaaagtgatagagtcagacactcacaggacaaatacaccaaggagaaggaagggaagaaataaagaaatccaggacctggaggagagctttgtgcctgttgctgcacccctaggtcatccaagagagctgcagaagtactccagtgattctgagagccccagaggaactggcagtggtgcgttgccaagtggtcagaagctggaggagttgaaggcagaggagccagataacttcagcagcaaagtagtgcagaggggccgagagttctttgacagcaacgggaacttcctgtacagaatttgagtcggggcttggcttatggagatgcctcgtgaaacacagctgggcaagtattaatgtatatggaacagcctggatttctgcatatggataagccaccttggaataggaagaggtgttgagcctggactgtgggaggaaagagctgcgtggatagattcaaacttcctgtggtagtgctcccagtctgacctctgtagaccttcagtactcactcttcttgcttaggctctctgtgtgttgaaagccatcccgtgttgcatgtgttgttacaattttctgtgatacttgcaatttatgtttgagaagaagtgaaaagtttgccttctgacctcatttccttcttgatcagtgaacactaacattttggggacaacttagtcaattggttttccttacaacaaaataaagtaaaatgtagcagtctgcctctttggtgctctttggggtgggatggtttacctgtgaaccttggagagagggaaggacaaaggcagaaaggaaggatccctggtcagtaaacattgggagagagatggaaccag

SEQ ID NO: 7937 - protein, 219 aa, Homo sapiens; identical to SEQ ID NO: 1096

SEQ ID NO: 7938 - DNA, 1033 bp, Homo sapiens
gacagaaacaagcaatccgattccagaaaattcggaggcaaatggaggcgcctggtgccccgcccaggaccctgacgtgggaagccatggagcagatacggtatttacatgaggaatttccagagtcctggtcagttcccaggttggctgaaggctttgatgtcagcactgatgtgatccgaagagttttaaaaagcaagtttttacccacattggagcagaagctgaagcaggatcaaaaagtccttaagaaagctgggcttgcccactcgctgcagcacctccggggctctggaaatacctcaaagctgctccctgcaggccactctgtatcaggctctttgcttatgccagggcatgaagcctcatctaaagacccaaatcacagcacagctttgaaagtgatagagtcagacactcacaggacaaatacaccaaggagaaggaagggaagaaataaagaaatccaggacctggaggagagctttgtgcctgttgctgcacccctaggtcatccaagagagctgcagaagtactccagtgattctgagagccccagaggaactggcagtggtgcgttgccaagtggtcagaagctggaggagttgaaggcagaggagccagataacttcagcagcaaagtagtgcagaggggccgagagttctttgacagcaacgggaacttcctgtacagaatttgagtcggggcttggcttatggagatgcctcgtgaaacacagctgggcaagtattaatgtatatggaacagcctggatttctgcatatggataagccaccttggaataggaagaggtgttgagcctggactgtgggaggaaagagctgcgtggatagattcaaacttcctgtggtagtgctcccagtctgacctctgtagaccttcagtactcactcttcttgcttaggctctctgtgtgttgaaagccatcccgtgttgcatgtgttgttacaattttctgtgatacttgcaatttatgtttgagaagaagtgaaaagtttgccttctgacctc

SEQ ID NO: 7939 - protein, 219 aa, Homo sapiens; identical to SEQ ID NO: 1096

SEQ ID NO: 7940 - DNA, 1243 bp, Homo sapiens
gacagaaacaagcaatccgattccagaaaattcggaggcaaatggaggcgcctggtgccccgcccaggaccctgacgtgggaagccatggagcagatacggtatttacatgaggaatttccagagtcctggtcagttcccaggttggctgaaggctttgatgtcagcactgatgtgatccgaagagttttaaaaagcaagtttttacccacattggagcagaagctgaagcaggatcaaaaagtccttaagaaagctgggcttgcccactcgctgcagcacctccggggctctggaaatacctcaaagctgctccctgcaggccactctgtatcaggctctttgcttatgccagggcatgaagcctcatctaaagacccaaatcacagcacagctttgaaagtgatagagtcagacactcacaggacaaatacaccaaggagaaggaagggaagaaataaagaaatccaggacctggaggagagctttgtgcctgttgctgcacccctaggtcatccaagagagctgcagaagtactccagtgattctgagagccccagaggaactggcagtggtgcgttgccaagtggtcagaagctggaggagttgaaggcagaggagccagataacttcagcagcaaagtagtgcagaggggccgagagttctttgacagcaacgggaacttcctgtacagaatttgagtcggggcttggcttatggagatgcctcgtgaaacacagctgggcaagtattaatgtatatggaacagcctggatttctgcatatggataagccaccttggaataggaagaggtgttgagcctggactgtgggaggaaagagctgcgtggatagattcaaacttcctgtggtagtgctcccagtctgacctctgtagaccttcagtactcactcttcttgcttaggctctctgtgtgttgaaagccatcccgtgttgcatgtgttgttacaattttctgtgatacttgcaatttatgtttgagaagaagtgaaaagtttgccttctgacctcatttccttcttgatcagtgaacactaacattttggggacaacttagtcaattggttttccttacaacaaaataaagtaaaatgtagcagtctgcctctttggtgctctttggggtgggatggtttacctgtgaaccttggagagagggaaggacaaaggcagaaaggaaggatccctggtcagtaaacattgggagagagatggaaccag

SEQ ID NO: 7941 - protein, 219 aa, Homo sapiens; identical to SEQ ID NO: 1096

SEQ ID NO: 7942 - DNA, 816 bp, Homo sapiens
ggtatttacatgaggaatttccagagtcctggtcagttcccaggttggctgaaggctttgatgtcagcactgatgtgatccgaagagttttaaaaagcaagtttttacccacattggagcagaagctgaagcaggatcaaaaagtccttaagaaagctgggcttgcccactcgctgcagcacctccggggctctggaaatacctcaaagctgctccctgcaggccactctgtatcaggctctttgcttatgccagggcatgaagcctcatctaaagacccaaatcacagcacagctttgaaagtgatagaccagataacttcagcagcaaagtagtgcagaggggccgagagttctttgacagcaacgggaacttcctgtacagaatttgagtcggggcttggcttatggagatgcctcgtgaaacacagctgggcaagtattaatgtatatggaacagcctggatttctgcatatggataagccaccttggaataggaagaggtgttgagcctggactgtgggaggaaagagctgcgtggatagattcaaacttcctgtggtagtgctcccagtctgacctctgtagaccttcagtactcactcttcttgcttaggctctctgtgtgttgaaagccatcccgtgttgcatgtgttgttacaattttctgtgatacttgcaatttatgtttgagaagaagtgaaaagtttgccttctgacctcatttccttcttgatcagtgaacactaacattttggggacaacttagtcaattggttttccttacaacaaaataaagtaaaatgtagcagtctg

SEQ ID NO: 7943 - protein, 38 aa, Homo sapiens
RPKSQHSFESDRPDNFSSKVVQRGREFFDSNGNFLYRI

SEQ ID NO: 7944 - DNA, 755 bp, Homo sapiens
ggtatttacatgaggaatttccagagtcctggtcagttcccaggttggctgaaggctttgatgtcagcactgatgtgatccgaagagttttaaaaagcaagtttttacccacattggagcagaagctgaagcaggatcaaaaagtccttaagaaagctgggcttgcccactcgctgcagcacctccggggctctggaaatacctcaaagctgctccctgcaggccactctgtatcaggctctttgcttatgccagggcatgaagcctcatctaaagacccaaatcacagcacagctttgaaagtgatagagtcagacactcacaggacaaatacaccaaggagaaggaagggaagaaataaagaaatccaggacctggaggagagctttgtgcctgttgctgcacccctaggtcatccaagagagctgcagaagtactccagtgattctgagagccccagaggaactggcagtggtgcgttgccaagtggtcagaagctggaggagttgaaggcagaggagccagataacttcagtactcactcttcttgcttaggctctctgtgtgttgaaagccatcccgtgttgcatgtgttgttacaattttctgtgatacttgcaatttatgtttgagaagaagtgaaaagtttgccttctgacctcatttccttcttgatcagtgaacactaacattttggggacaacttagtcaattggttttccttacaacaaaataaagtaaaatgtagcagtctg

SEQ ID NO: 7945 - protein, 127 aa, Homo sapiens
MPGHEASSKDPNHSTALKVIESDTHRTNTPRRRKGRNKEIQDLEESFVPVAAPLGHPRELQKYSSDSESPRGTGSGALPSGQKLEELKAEEPDNFSTHSSCLGSLCVESHPVLHVLLQFSVILAIYV

SEQ ID NO: 7946 - DNA, 933 bp, Homo sapiens
ggtatttacatgaggaatttccagagtcctggtcagttcccaggttggctgaaggctttgatgtcagcactgatgtgatccgaagagttttaaaaagcaagtttttacccacattggagcagaagctgaagcaggatcaaaaagtccttaagaaagctgggcttgcccactcgctgcagcacctccggggctctggaaatacctcaaagctgctccctgcaggccactctgtatcaggctctttgcttatgccagggcatgaagcctcatctaaagacccaaatcacagcacagctttgaaagtgatagaccagataacttcagcagcaaagtagtgcagaggggccgagagttctttgacagcaacgggaacttcctgtacagaatttgagtcggggcttggcttatggagatgcctcgtgaaacacagctgggcaagtattaatgtatatggaacagcctggatttctgcatatggataagccaccttggaataggaagaggtgttgagcctggactgtgggaggaaagagctgcgtggatagattcaaacttcctgtggtagtgctcccagtctgacctctgtagaccttcagtactcactcttcttgcttaggctctctgtgtgttgaaagccatcccgtgttgcatgtgttgttacaattttctgtgatacttgcaatttatgtttgagaagaagtgaaaagtttgccttctgacctcatttccttcttgatcagtgaacactaacattttggggacaacttagtcaattggttttccttacaacaaaataaagtaaaatgtagcagtctgcctctttggtgctctttggggtgggatggtttacctgtgaaccttggagagagggaaggacaaaggcagaaaggaaggatccctggtcagtaaacattgggagagagatggaaccag

SEQ ID NO: 7947 - protein, 38 aa, Homo sapiens; identical to SEQ ID NO: 7943

SEQ ID NO: 7948 - DNA, 709 bp, Homo sapiens
ggtatttacatgaggaatttccagagtcctggtcagttcccaggttggctgaaggctttgatgtcagcactgatgtgatccgaagagttttaaaaagcaagtttttacccacattggagcagaagctgaagcaggatcaaaaagtccttaagaaagctgggcttgcccactcgctgcagcacctccggggctctggaaatacctcaaagctgctccctgcaggccactctgtatcaggctctttgcttatgccagggcatgaagcctcatctaaagacccaaatcacagcacagctttgaaagtgatagagtcagacactcacaggacaaatacaccaaggagaaggaagggaagaaataaagaaatccaggacctggaggagagctttgtgcctgttgctgcacccctaggtcatccaagagaagctgcgtggatagattcaaacttcctgtggtagtgctcccagtctgacctctgtagaccttcagtactcactcttcttgcttaggctctctgtgtgttgaaagccatcccgtgttgcatgtgttgttacaattttctgtgatacttgcaatttatgtttgagaagaagtgaaaagtttgccttctgacctcatttccttcttgatcagtgaacactaacattttggggacaacttagtcaattggttttccttacaacaaaataaagtaaaatgtagcagtctg

SEQ ID NO: 7949 - protein, 69 aa, Homo sapiens
MPGHEASSKDPNHSTALKVIESDTHRTNTPRRRKGRNKEIQDLEESFVPVAAPLGHPREAAWIDSNFLW

SEQ ID NO: 7950 - DNA, 903 bp, Homo sapiens
ctggtcagttcccaggttggctgaaggctttgatgtcagcactgatgtgatccgaagagttttaaaaagcaagtttttacccacattggagcagaagctgaagcaggatcaaaaagtccttaagaaagctgggcttgcccactcgctgcagcacctccggggctctggaaatacctcaaagctgctccctgcaggccactctgtatcaggctctttgcttatgccagggcatgaagcctcatctaaagacccaaatcacagcacagctttgaaagtgatagagtcagacactcacaggacaaatacaccaaggagaaggaagggaagaaataaagaaatccaggacctggaggagagctttgtgcctgttgctgcacccctaggtcatccaagagagccagataacttcagcagcaaagtagtgcagaggggccgagagttctttgacagcaacgggaacttcctgtacagaatttgagtcggggcttggcttatggagatgcctcgtgaaacacagctgggcaagtattaatgtatatggaacagcctggatttctgcatatggataagccaccttggaataggaagaggtgttgagcctggactgtgggaggaaagagctgcgtggatagattcaaacttcctgtggtagtgctcccagtctgacctctgtagaccttcagtactcactcttcttgcttaggctctctgtgtgttgaaagccatcccgtgttgcatgtgttgttacaattttctgtgatacttgcaatttatgtttgagaagaagtgaaaagtttgccttctgacctcatttccttcttgatcagtgaacactaacattttggggacaacttagtcaattggttttccttacaacaaaataaagtaaaatgtagcagtctg

SEQ ID NO: 7951 - protein, 85 aa, Homo sapiens
MPGHEASSKDPNHSTALKVIESDTHRTNTPRRRKGRNKEIQDLEESFVPVAAPLGHPREPDNFSSKVVQRGREFFDSNGNFLYRI

SEQ ID NO: 7952 - DNA, 838 bp, Homo sapiens
ctgaaggctttgatgtcagcactgatgtgatccgaagagttttaaaaagctctttgcttatgccagggcatgaagcctcatctaaagacccaaatcacagcacagctttgaaagtgatagagtcagacactcacaggacaaatacaccaaggagaaggaagggaagaaataaagaaatccaggacctggaggagagctttgtgcctgttgctgcacccctaggtcatccaagagagctgcagaagtactccagtgattctgagagccccagaggaactggcagtggtgcgttgccaagtggtcagaagctggaggagttgaaggcagaggagccagataacttcagcagcaaagtagtgcagaggggccgagagttctttgacagcaacgggaacttcctgtacagaatttgagtcggggcttggcttatggagatgcctcgtgaaacacagctgggcaagtattaatgtatatggaacagcctggatttctgcatatggataagccaccttggaataggaagaggtgttgagcctggactgtgggaggaaagagctgcgtggatagattcaaacttcctgtggtagtgctcccagtctgacctctgtagaccttcagtactcactcttcttgcttaggctctctgtgtgttgaaagccatcccgtgttgcatgtgttgttacaattttctgtgatacttgcaatttatgtttgagaagaagtgaaaagtttgccttctgacctcatttccttcttgatcagtgaacactaacattttggggacaacttagtcaattggttttccttacaacaaaataaagtaaaatgtagcagtctg

SEQ ID NO: 7953 - protein, 117 aa, Homo sapiens
MPGHEASSKDPNHSTALKVIESDTHRTNTPRRRKGRNKEIQDLEESFVPVAAPLGHPRELQKYSSDSESPRGTGSGALPSGQKLEELKAEEPDNFSSKVVQRGREFFDSNGNFLYRI

SEQ ID NO: 7954 - DNA, 955 bp, Homo sapiens
ctgaaggctttgatgtcagcactgatgtgatccgaagagttttaaaaagctctttgcttatgccagggcatgaagcctcatctaaagacccaaatcacagcacagctttgaaagtgatagagtcagacactcacaggacaaatacaccaaggagaaggaagggaagaaataaagaaatccaggacctggaggagagctttgtgcctgttgctgcacccctaggtcatccaagagagctgcagaagtactccagtgattctgagagccccagaggaactggcagtggtgcgttgccaagtggtcagaagctggaggagttgaaggcagaggagccagataacttcagcagcaaagtagtgcagaggggccgagagttctttgacagcaacgggaacttcctgtacagaatttgagtcggggcttggcttatggagatgcctcgtgaaacacagctgggcaagtattaatgtatatggaacagcctggatttctgcatatggataagccaccttggaataggaagaggtgttgagcctggactgtgggaggaaagagctgcgtggatagattcaaacttcctgtggtagtgctcccagtctgacctctgtagaccttcagtactcactcttcttgcttaggctctctgtgtgttgaaagccatcccgtgttgcatgtgttgttacaattttctgtgatacttgcaatttatgtttgagaagaagtgaaaagtttgccttctgacctcatttccttcttgatcagtgaacactaacattttggggacaacttagtcaattggttttccttacaacaaaataaagtaaaatgtagcagtctgcctctttggtgctctttggggtgggatggtttacctgtgaaccttggagagagggaaggacaaaggcagaaaggaaggatccctggtcagtaaacattgggagagagatggaaccag

SEQ ID NO: 7955 - protein, 117 aa, Homo sapiens; identical to SEQ ID NO: 7953

SEQ ID NO: 7956 - DNA, 3378 bp, Homo sapiens
taagagctgggcatggcagaatgtgcctacagtcccagttacttgggaggccgaggtgggagaatcgcttgagcctcggaggttgaggctgcagtgagctatgattgcaccactgcactccagcctgggataacagtgagacccccatctctaaataaaatcaatcgatcttcaattatgtctcattatacagtttacttaaccagatttttacaatggtgccatggtgtaggcaatcccggattaagaggtcccttttacaaataaggaaatagactttaagatggctgccagtaagtggcagtgctgggacttaactcgggtctcatcattaatccagggcttctggaattccgggaatatggcactgtctgccataattttgttaatttactgcttgttttagaaatacatctgttataactagaaattcggggacagcttagtcaatttgttttccttacaagcaaaataaagtaaaatgtagcagtctgctcattagtgctctggtgggatggtttacctgtgaaccttggagaaccatgtcctgctttcacaatttaccaggaaaaatggctactccgaatttaaatatatgtaggacattaatggaaacacctacattccaactcagtcattgccactctgtagaatcttactgctatttcaaatgtccaattacagcaattaaaatactgattactgttgcttttatcaattattattgataacttgaggatctgttctcagtataaatgacaaagccctgtcacatgccaagcaaaattctacgatccagatgctggtaatacaacagtgggcagataggacctttgctgtcactgccctgtcactatcatgtagttcatagtagaagcttatcagtatttttatggttttgttatatttatggtatttaattgttaaagatgtgttagatgctgtttgattgtttaaatttgcatttctcactcctgcaaatatctgatcatgccatacccttttcgcagtgggctatagaaacctaaaggctgttcttaaaactttgttttttaatttatttttgacacggactctcgctctgtcgcccaggctggagtacagtggcacaatctcagctcactgcaacctccgcctcccaggttcaactgattctcctgcttcaacctcccgagtagctgggattacaggcgtctgccactgtgcccagctaatttttgtgtttttagtagagatggggtttcaccatgttggccaggctggtctcaaactctgacctcaagtgatctgcctgtctcggcctcctacagtgctaggattacaggtgtgagccaccacgcctggcctttatttttcttttgagacagggtctcactcttgtcgtccacactggagtacagtggctcaatcttgcctcactgcaacctctgcctcccaggttcaagcggttctcattcttcagcctcccgagtagctggaactacaggcgggcaccaccatgcccagctaattttttttatatttttagtagagacaggatttcaccatgttggccaagctggtctcaaactcctgacctcaagttatctacctgccttggcctcccaaagtgctgggattataggcgtgagccaacacgcctgacctttatttcttttgagacagggtcttgctctgtcatccatgctggagtgcagtggctcaatctcagctcactgcaatctctgcctcctgggttcaaactattctcattccttagcctcccgagtagctgggactacaggcatgcaccaccacacccagctaatcttttatttttagtagagataggatttcactatcttggccaggctggtctcgaactcctgtgctcaggtgatctgcctgcttcggcctcccaaaatgctgagattacaacgtgagccaccacgtgaggcaggcggatcacctgaggtcaggagtttcagaccagcctggccaacatggcaaaaccccatctctactaaaaatacaaaaattatctgggtgtggtggcagatgcctgtaatcccagctactgggaaggctgaggcaggagaattgcttgaacccgggaggcagaggttgcagtgagccgagattgtgccactgcacttcaccttgggtgacagtgagactccatctcaaacaaacaaacacctccaatgctgtatctcaaataccatgtctacccttcttcctgctttacttcatctattacacaagtaatacatactcattaaagaaaaagacaagcaaaatgaaaacaaaagtcatccctgatcccaccagtgaagagttactatcctaccaacatttttctaagcatatgtacaactttaagacaagcacgaaagaataatacgcgcccagccctgaataattcattcttgctaagcttcatgttgactctatatatcatctaagaaagtattgttttgtggtccaaacctgttgccgtggttagtaaggctttcttaggtgtgaaatatttagatgaaattttctcttttaaagttctgtatagggttagggtgttggaaaatgctatattaataaatctgtagtgttttgtgtttataggttcagaaccagagtaactggattgaaagatggactgatagattagatatatcagtctaatttatcatgactgatagatctggttaagttgtgtactaaaggattaggagagcccttcctgtcacaaaagtgccactaaaacagcctaaggagaaaaatggcttgcttttctaaacttcagatgtatctgggctctaatcatatagacaggcttctgatagattgcaactgtaagtagaaacctacatatagttaaaatcctggtctttcttggtaaacagatttaaaatgtctgatgtaaaacatgccacaggagaattcagggatttgagtttccctgaatagcatatatatgatgcatcaaatgggttattactattttttaccatttccacttacataatgaaaaacaattcattttaaatatcacattattattttgtaagtcatggaaaagggcaattgaagttttcattatgaagttttcccaataaaccaggaattctaaacttgaaaaaaaaaaatagaattagccaggtatggttgcacaggcctgtaatcccagctacccgggaggctgaggcaggagaatcacctgaacctgagaggcagaggcttcagtgagccgaggccacaccactgcactccggccttggtgacagagactctgcctcgaaagataaaaataataatgaaagtaatattgggattatactgtacattctttcttacatgtatggtgaatatattttgacaataaatatctttacatcagtt

SEQ ID NO: 7957 - protein, 69 aa, Homo sapiens [sequence omitted]

SEQ ID NO: 7958 - DNA, 615 bp, Homo sapiens
ttattattgataacttgaggatctgttctcagtataaatgacaaagccctgtcacatgccaagcaaaattctacgatccagatgctggtaatacaacagtgggcagataggacctttgctgtcactgccctgtcactatcatgtagttcatagtagaagcttatcagtatttttatggttttgttatatttatggtatttaattgttaaagatgtgttagatgctgtttgattgtttaaatttgcatttctcactcctgcaaatatctgatcatgccatacccttttcgcagtgggctatagaaacctaaaggctgttcttaaaactttgttttttaatttatttttgacacggactctcgctctgtcgcccaggctggagtacagtggcacaatctcagctcactgcaacctccgcctcccaggagaatcacctgaacctgagaggcagaggcttcagtgagccgaggccacaccactgcactccggccttggtgacagagactctgcctcgaaagataaaaataataatgaaagtaatattgggattatactgtacattctttcttacatgtatggtgaatatattttgacaataaatatctttacatcagtt

SEQ ID NO: 7959 - protein, 63 aa, Homo sapiens
SCHTLFAVGYRNLKAVLKTLFFNLFLTRTLALSPRLEYSGTISAHCNLRLPGESPEPERQRLQ

SEQ ID NO: 7960 - DNA, 481 bp, Homo sapiens
gtgactggaggcattcatcagtgctcactgggatttcactgatgtggcccaaccccgcctccctccacaccccatgatgtcagaaaaaacacgacagggcaaatgggccgcagccaggaaaaaggtggcatttttcaactccgctggaaccagtgcccaggaggagcaaaggatgtgctgccagcccctggctcacccagtggcctcgtcccagaagaagccagaagcagcagccccagccccagggactgggggaaagtacatcaccccatatgggagccaggggacagtgccaaagatgcggcaccgggaggaggaggagatcgtcaggctggcccaggaccgggaggagatgaaggtgaacctgctggagatgcaggggcaggtgttgcggcttgtgagagaccacaatgagggacatggcaagttcctggccactgcccagaaccctgctgatgagcccactctaggagccccagcc

SEQ ID NO: 7961 - protein, 135 aa, Homo sapiens
MMSEKTRQGKWAAARKKVAFFNSAGTSAQEEQRMCCQPLAHPVASSQKKPEAAAPAPGTGGKYITPYGSQGTVPKMRHREEEEIVRLAQDREEMKVNLLEMQGQVLRLVRDHNEGHGKFLATAQNPADEPTLGAP

SEQ ID NO: 7962 - DNA, 873 bp, Homo sapiens
atgcccagggacttccagcaggtggagctgaagagccaagaggctcagagtctgcagcagcagcgaggccagtacctgggtcacctgaagcagtacgtggccacttatcagcagcaggagcacctggaagctaccagccagcagaaccagcaactacaggcccagttgagcctcatggctctccctggggaagtaaaaataaagaacagctcattcccctctggggaggggctggctcaaggttacacagagatggaggaggaggcgcctcagcccatgccgaacatcccaggggacctggagagccgggagacggtggtggcatttttcaactccgctggaaccagtgcccaggaggagcaaaggatgtgctgccagcccctggctcacccagtggcctcgtcccagaagaagccagaagcagcagccccagccccagggactgggggaaagtacatcaccccatatgggagccaggggacagtgccaaagatgcggcaccgggaggaggaggagatcgtcaggctggcccaggaccgggaggagatgaaggtgaacctgctggagatgcaggggcaggtgttgcggcttgtgagagaccacaatgagggacatggcaagttcctggccactgcccagaaccctgctgatgagcccactctaggagccccagccccccaagagcttgtgagcctcactgacagcgtggagcccgcaccaggagaggccagggagggttctccccacgacaaccccactgcacagcagatcatgcagctgcttcctgtaacgcaggactccccaggagcacccaggcttgggcagcaatctctgcatgcctttcttttcgagctgccgagaacagggagataa

SEQ ID NO: 7963 - protein, 290 aa, Homo sapiens
MPRDFQQVELKSQEAQSLQQQRGQYLGHLKQYVATYQQQEHLEATSQQNQQLQAQLSLMALPGEVKIKNSSFPSGEGLAQGYTEMEEEAPQPMPNIPGDLESRETVVAFFNSAGTSAQEEQRMCCQPLAHPVASSQKKPEAAAPAPGTGGKYITPYGSQGTVPKMRHREEEEIVRLAQDREEMKVNLLEMQGQVLRLVRDHNEGHGKFLATAQNPADEPTLGAPAPQELVSLTDSVEPAPGEAREGSPHDNPTAQQIMQLLPVTQDSPGAPRLGQQSLHAFLFELPRTGR

SEQ ID NO: 7964 - DNA, 436 bp, Homo sapiens
ggtggcatttttcaactccgctggaaccagtgcccaggaggagcaaaggatgtgctgccagcccctggctcacccagtggcctcgtcccagaagaagccagaagcagcagccccagccccagggactgggggaaagtacatcaccccatatgggagccaggggacagtgccaaagatgcggcaccgggaggaggaggagatcgtcaggctggcccaggaccgggaggagatgaaggtactctgcataacaactggttatgatcagggccaatgactccccaccacttcccagcagataaggctcaggcattgaagcagagagtccctttgggccctgaggatgcaggaagtacctgcacccacctaagacctccatcattggttcatccaaactacttcctaatgtcagaataagaaacaagtctcttttgggctc

SEQ ID NO: 7965 - protein, 74 aa, Homo sapiens
MCCQPLAHPVASSQKKPEAAAPAPGTGGKYITPYGSQGTVPKMRHREEEEIVRLAQDREEMKVLCITTGYDQGQ

SEQ ID NO: 7966 - DNA, 722 bp, Homo sapiens
gtggcatttttcaactccgctggaaccagtgcccaggaggagcaaaggatgtgctgccagcccctggctcacccagtggcctcgtcccagaagaagccagaagcagcagccccagccccagggactgggggaaagtacatcaccccatatgggagccaggggacagtgccaaagatgcggcaccgggaggaggaggagatcgtcaggctggcccaggaccgggaggagatgaaggtgaacctgctggagatgcaggggcaggtgttgcggcttgtgagagaccacaatgagggacatggcaagttcctggccactgcccagaaccctgctgatgagcccactctaggagccccagccccccaagagcttgtgtgtgctgacaagcaggatggccagtagaaccttcaggcagggtgagcaggcaggagcaggggaggctcgcatggcgctccgatcccctcctccctctctccgaagatctttgtgaggtgagcctcactgacagcgtggagcccgcaccaggagaggccagggagggttctccccacgacaaccccactgcacagcagatcatgcagctgcttcctgtaacgcaggactccccaggagcacccaggcttgggcagcaatctctgcatgcctttcttttcgagctgccgagaacagggagataaacaccaccatcatctaagagctggtcaagaaattaaaaaaaaaaaaaa

SEQ ID NO: 7967 - protein, 116 aa, Homo sapiens
MCCQPLAHPVASSQKKPEAAAPAPGTGGKYITPYGSQGTVPKMRHREEEEIVRLAQDREEMKVNLLEMQGQVLRLVRDHNEGHGKFLATAQNPADEPTLGAPAPQELVCADKQDGQ

SEQ ID NO: 7968 - DNA, 1772 bp, Homo sapiens
ccggtcgggttctgggaggcacagcctcggggttgcgggccgggtgcggctcggcggtggaggactcacttcctgctccatccccggctgggccctggggcggaactgatgacgcttgataatgtggctggggacttcagggaagagtgggttacctggacactgcttagagaatcctctccaggaatgccacccagcacagttagaagaatgggctctcaaaggaatttccaggcctagtgtaatctcccagccggagcagaaagaagagccatgggtcctaccactccaaaactttgaggcgaggaagatcccgagggaaagccacacagactgtgagcatcaggtggcaaagctcaatcaggacaattctgaaacagcagaacaatgtggaacatcctcagaaaggaccaataaagatctttctcatactcttagttggggaggaaactgggagcaaggcctagaattagaagggcaacatggaacccttccaggagagggccagctggagtccttttcacaggagagggatttaaacaagctcctggatggatatgtaggagagaagcctatgtgtgcagaatgcgggaaaagctttaaccagagttcctatctcataagacacctaagaacccacactggcgagaggccctatacgtgcattgagtgtgggaaaggcttcaaacagagctcagaccttgtcacccatcgcagaacacacacaggagagaagccctaccaatgcaaggggtgtgagaagaaattcagcgacagctcaacactcatcaaacatcagagaacccacacaggggagagaccctatgagtgcccagagtgtggaaagacttttgggcggaagccacacctcataatgcaccaaagaacccacacaggcgagaagccctacgcgtgcctggaatgtcacaaaagcttcagtcgaagctcaaatttcatcactcaccagaggacccacacaggggtgaagccttacaggtgtaatgactgtggggagagttttagccagagctcggatttgattaagcaccaacgaacccacacgggagaacggcccttcaaatgcccggagtgcgggaagggcttcagagatagttctcattttgtagctcacatgagcactcattcaggagagaggcctttcagttgtcctgactgccacaaaagcttcagtcagagctcacatttggtcacgcaccaaagaacacacacaggtgagagaccttttaagtgcgaaaactgtgggaaaggattcgccgacagctccgccctcattaagcaccaacgaatccacaccggagaaagaccctacaaatgtggagagtgtgggaagagcttcaatcagagctcccactttattacccatcagcgaatccacttaggagacaggccctatcgatgtcctgagtgtggcaagaccttcaatcagcgttcccatttcctcacacaccagagaacgcatacaggagaaaaacctttccactgtagtaaatgtaacaagagcttccgtcagaaagcgcatcttttatgccatcaaaacacccatttgatttaggaagtagtctttggtgttcagctgctcccttgcacattttcattgctactgtcttcaagcaccccaaatagagaaaacctgggcgtcagtggctcaatttgggccctgatctattctccctctttcttgtctatgttataacagagaggataaacttaaagggtccaaataacggtccgaatacaaaaggcattccttc

SEQ ID NO: 7969 - protein, 483 aa, Homo sapiens
MWLGTSGKSGLPGHCLENPLQECHPAQLEEWALKGISRPSVISQPEQKEEPWVLPLQNFEARKIPRESHTDCEHQVAKLNQDNSETAEQCGTSSERTNKDLSHTLSWGGNWEQGLELEGQHGTLPGEGQLESFSQERDLNKLLDGYVGEKPMCAECGKSFNQSSYLIRHLRTHTGERPYTCIECGKGFKQSSDLVTHRRTHTGEKPYQCKGCEKKFSDSSTLIKHQRTHTGERPYECPECGKTFGRKPHLIMHQRTHTGEKPYACLECHKSFSRSSNFITHQRTHTGVKPYRCNDCGESFSQSSDLIKHQRTHTGERPFKCPECGKGFRDSSHFVAHMSTHSGERPFSCPDCHKSFSQSSHLVTHQRTHTGERPFKCENCGKGFADSSALIKHQRIHTGERPYKCGECGKSFNQSSHFITHQRIHLGDRPYRCPECGKTFNQRSHFLTHQRTHTGEKPFHCSKCNKSFRQKAHLLCHQNTHLI

SEQ ID NO: 7970 - DNA, 2506 bp, Homo sapiens
cggtcgggttctgggaggcacagcctcggggttgcgggccgggtgcggctcggcggtggaggactcacttcctgctccatccccggctgggccctggggcggaactgatgacgcttgataatgtggctggggacttcagggaagagtgggttacctggacactgcttagagaatcctctccaggaatgccacccagcacagttagaagaatgggctctcaaaggaatttccaggcctagtgtaatctcccagccggagcagaaagaagagccatgggtcctaccactccaaaactttgaggcgaggaagatcccgagggaaagccacacagactgtgagcatcaggtggcaaagctcaatcaggacaattctgaaacagcagaacaatgtggaacatcctcagaaaggaccaataaagatctttctcatactcttagttggggaggaaactgggagcaaggcctagaattagaagggcaacatggaacccttccaggagagggccagctggagtccttttcacaggagagggatttaaacaagctcctggatggatatgtaggagagaagcctatgtgtgcagaatgcgggaaaagctttaaccagagttcctatctcataagacacctaagaacccacactggcgagaggccctatacgtgcattgagtgtgggaaaggcttcaaacagagctcagaccttgtcacccatcgcagaacacacacaggagagaagccctaccaatgcaaggggtgtgagaagaaattcagcgacagctcaacactcatcaaacatcagagaacccacacaggggagagaccctatgagtgcccagagtgtggaaagacttttgggcggaagccacacctcataatgcaccaaagaacccacacaggcgagaagccctacgcgtgcctggaatgtcacaaaagcttcagtcgaagctcaaatttcatcactcaccagaggacccacacaggggtgaagccttacaggtgtaatgactgtggggagagttttagccagagctcggatttgattaagcaccaacgaacccacacgggagaacggcccttcaaatgcccggagtgcgggaagggcttcagagatagttctcattttgtagctcacatgagcactcattcaggagagaggcctttcagttgtcctgactgccacaaaagcttcagtcagagctcacatttggtcacgcaccaaagaacacacacaggtgagagaccttttaagtgcgaaaactgtgggaaaggattcgccgacagctccgccctcattaagcaccaacgaatccacaccggagaaagaccctacaaatgtggagagtgtgggaagagcttcaatcagagctcccactttattacccatcagcgaatccacttaggagacaggccctatcgatgtcctgagtgtggcaagaccttcaatcagcgttcccatttcctcacacaccagagaacgcatacaggagaaaaacctttccactgtagtaaatgtaacaagagcttccgtcagaaagcgcatcttttatgccatcaaaacacccatttgatttaggaagtagtctttggtgttcagctgctcccttgcacattttcattgctactgtcttcaagcaccccaaatagagaaaacctgggcgtcagtggctcaatttgggccctgatctattctccctctttcttgtctatgttataacagagaggataaacttaaagggtccaaataacggtccgaatacaaaaggcattccttcagtgtgtgactgactcttagggaaatgtgagtttaatagttgatgcccgccaggcgtggtggctcacccctgtaatcccagcacttttgggaggccaaggtgggtggatcacttgaggtcaggagttgagaccagcctggtgagcatggtgaaacctcatctctactaaaaatgcaaaaattagctgggcatggtggcacgtgcctgtagtcccagctactcgggaggccgaggcagaagaatcatttgaactcagaaggtgcaggttgcagtgagttgagatcatgccactgcactccagcctgggcaacagagagagactctgtctccaaaaaaattaaaaagttgatgcctagttactaaatgagaagtgagaaaaatgtggcctagagatcacatgttcaccacctagtacagtgcctggcacaacatagatgctcaataactaaatggtcccatcattattaatgattaatagttgaggtcttatataaaggctttaatgcagtacctggcccttaaaagacactcagtacaagattggtggcttttatcagtcttattactcaattagaaatttattagtgtagtccccccgccccaaactcagaacgtgaaagaaattagattggaactagaaggtttggggttggaatacacaaattgaataaaatggaaatgcactgccagttcagtgctgtgcaggcattagtcaccagaggtctcactgccatg

SEQ ID NO: 7971 - protein, 483 aa, Homo sapiens; identical to SEQ ID NO: 7969

SEQ ID NO: 7972 - DNA, 6542 bp, Homo sapiens
gacggcacggggcggggcctcggggaccccggcaagcccgcgcacttggcaggagctgtagctaccgccgtccgcgcctccaaggtttcacggcttcctcagcagagactcgggctcgtccgccatgtccgccgcagacgaggttgacgggctgggcgtggcccggccgcactatggctctgtcctggataatgaaagacttactgcagaggagatggatgaaaggagacgtcagaacgtggcttatgagtacctttgtcatttggaagaagcgaagaggtggatggaagcatgcctaggggaagatctgcctcccaccacagaactggaggaggggcttaggaatggggtctaccttgccaaactggggaacttcttctctcccaaagtagtgtccctgaaaaaaatctatgatcgagaacagaccagatacaaggcgactggcctccactttagacacactgataatgtgattcagtggttgaatgccatggatgagattggattgcctaagattttttacccagaaactacagatatctatgatcgaaagaacatgccaagatgtatctactgtatccatgcactcagtttgtacctgttcaagctaggcctggcccctcagattcaagacctatatggaaaggttgacttcacagaagaagaaatcaacaacatgaagactgagttggagaagtatggcatccagatgcctgcctttagcaagattgggggcatcttggctaatgaactgtcagtggatgaagccgcattacatgctgctgttattgctattaatgaagctattgaccgtagaattccagccgacacatttgcagctttgaaaaatccgaatgccatgcttgtaaatcttgaagagcccttggcatccacttaccaggatatactttaccaggctaagcaggacaaaatgacaaatgctaaaaacaggacagaaaactcagagagagaaagagatgtttatgaggagctgctcacgcaagctgaaattcaaggcaatataaacaaagtcaatacattttctgcattagcaaatatcgacctggctttagaacaaggagatgcactggccttgttcagggctctgcagtcaccagccctggggcttcgaggactgcagcaacagaatagcgactggtacttgaagcagctcctgagtgataaacagcagaagagacagagtggtcagactgaccccctgcagaaggaggagctgcagtctggagtggatgctgcaaacagtgctgcccagcaatatcagagaagattggcagcagtagcactgattaatgctgcaatccagaagggtgttgctgagaagactgttttggaactgatgaatcccgaagcccagctgccccaggtgtatccatttgccgccgatctctatcagaaggagctggctaccctgcagcgacaaagtcctgaacataatctcacccacccagagctctctgtcgcagtggagatgttgtcatcggtggccctgatcaacagggcattggaatcaggagatgtgaatacagtgtggaagcaattgagcagttcagttactggtcttaccaatattgaggaagaaaactgtcagaggtatctcgatgagttgatgaaactgaaggctcaggcacatgcagagaataatgaattcattacatggaatgatatccaagcttgcgtggaccatgtgaacctggtggtgcaagaggaacatgagaggattttagccattggtttaattaatgaagccctggatgaaggtgatgcccaaaagactctgcaggccctacagattcctgcagctaaacttgagggagtccttgcagaagtggcccagcattaccaagacacgctgattagagcgaagagagagaaagcccaggaaatccaggatgagtcagctgtgttatggttggatgaaattcaaggtggaatctggcagtccaacaaagacacccaagaagcacagaagtttgccttaggaatctttgccattaatgaggcagtagaaagtggtgatgttggcaaaacactgagtgcccttcgctcccctgatgttggcttgtatggagtcatccctgagtgtggtgaaacttaccacagtgatcttgctgaagccaagaagaaaaaactggcagtaggagataataacagcaagtgggtgaagcactgggtaaaaggtggatattattattaccacaatctggagacccaggaaggaggatgggatgaacctccaaattttgtgcaaaattctatgcagctttctcgggaggagatccagagttctatctctggggtgactgccgcatataaccgagaacagctgtggctggccaatgaaggcctgatcaccaggctgcaggctcgctgccgtggatacttagttcgacaggaattccgatccaggatgaatttcctgaagaaacaaatccctgccatcacctgcattcagtcacagtggagaggatacaagcagaagaaggcatatcaagatcggttagcttacctgcgctcccacaaagatgaagttgtaaagattcagtccctggcaaggatgcaccaagctcgaaagcgctatcgagatcgcctgcagtacttccgggaccatataaatgacattatcaaaatccaggcttttattcgggcaaacaaagctcgggatgactacaagactctcatcaatgctgaggatcctcctatggttgtggtccgaaaatttgtccacctgctggaccaaagtgaccaggattttcaggaggagcttgaccttatgaagatgcgggaagaggttatcaccctcattcgttctaaccagcagctggagaatgacctcaatctcatggatatcaaaattggactgctagtgaaaaataagattacgttgcaggatgtggtttcccacagtaaaaaacttaccaaaaaaaataaggaacagttgtctgatatgatgatgataaataaacagaagggaggtctcaaggctttgagcaaggagaagagagagaagttggaagcttaccagcacctgttttatttattgcaaaccaatcccacctatctggccaagctcatttttcagatgccccagaacaagtccaccaagttcatggactctgtaatcttcacactctacaactacgcgtccaaccagcgagaggagtacctgctcctgcggctctttaagacagcactccaagaggaaatcaagtcgaaggtagatcagattcaagagattgtgacaggaaatcctacggttattaaaatggttgtaagtttcaaccgtggtgcccgtggccagaatgccctgagacagatcttggccccagtcgtgaaggaaattatggatgacaaatctctcaacatcaaaactgaccctgtggatatttacaaatcttgggttaatcagatggagtctcagacaggagaggcaagcaaactgccctatgatgtgacccctgagcaggcgctagctcatgaagaagtgaagacacggctagacagctccatcaggaacatgcgggctgtgacagacaagtttctctcagccattgtcagctctgtggacaaaatcccttatgggatgcgcttcattgccaaagtgctgaaggactcgttgcatgagaagttccctgatgctggtgaggatgagctgctgaagattattggtaacttgctttattatcgatacatgaatccagccattgttgctcctgatgcctttgacatcattgacctgtcagcaggaggccagcttaccacagaccaacgccgaaatctgggctccattgcaaaaatgcttcagcatgctgcttccaataagatgtttctgggagataatgcccacttaagcatcattaatgaatatctttcccagtcctaccagaaattcagacggtttttccaaactgcttgtgatgtcccagagcttcaggataaatttaatgtggatgagtactctgatttagtaaccctcaccaaaccagtaatctacatttccattggtgaaatcatcaacacccacactctcctgttggatcaccaggatgccattgctccggagcacaatgatccaatccacgaactgctggacgacctcggcgaggtgcccaccatcgagtccctgataggggaaagctctggcaatttaaatgacccaaataaggaggcactggctaagacggaagtgtctctcaccctgaccaacaagttcgacgtgcctggagatgagaatgcagaaatggatgctcgaaccatcttactgaatacaaaacgtttaattgtggatgtcatccggttccagccaggagagaccttgactgaaatcctagaaacaccagccaccagtgaacaggaagcagaacatcagagagccatgcagagacgtgctatccgtgatgccaaaacacctgacaagatgaaaaagtcaaaatctgtaaaggaagacagcaacctcactcttcaagagaagaaagagaagatccagacaggtttaaagaagctaacagagcttggaaccgtggacccaaagaacaaataccaggaactgatcaacgacattgccagggatattcggaatcagcggaggtaccgacagaggagaaaggccgaactagtgaaactgcaacagacatacgctgctctgaactctaaggccaccttttatggggagcaggtggattactataaaagctatatcaaaacctgcttggataacttagccagcaagggcaaagtctccaaaaagcctagggaaatgaaaggaaagaaaagcaaaaagatttctctgaaatatacagcagcaagactacatgaaaaaggagttcttctggaaattgaggacctgcaagtgaatcagtttaaaaatgttatatttgaaatcagtccaacagaagaagttggagacttcgaagtgaaagccaaattcatgggagttcaaatggagacttttatgttacattatcaggacctgctgcagctacagtatgaaggagttgcagtcatgaaattatttgatagagctaaagtaaatgtcaacctcctgatcttccttctcaacaaaaagttctacgggaagtaattgatcgtttgctgccagcccagaaggatgaaggaaagaagcacctcacagctcctttctaggtccttctttcctcattggaagcaaagacctagccaacaacagcacctcaatctgatacactcccgatgccacatttttaactcctctcgctctgatgggacatttgttacccttttttcatagtgaaattgtgtttcaggcttagtctgacctttctggtttcttcattttcttccattacttaggaaagagtggaaactccactaaaatttctctgtgttgttacagtcttagaggttgcagtactatattgtaagctttggtgtttgtttaattagcaatagggatggtaggattcaaatgtgtgtcatttagaagtggaagctattagcaccaatgacataaatacatacaagacacacaactaaaatgtcatgttattaacagttattaggttgtcatttaaaaataaagttcctttatatttctgtcccatcaggaaaactgaaggatatggggaatcattggttatcttccattgtgtttttctttatggacaggagctaatggaagtgacagtcatgttcaaaggaagcatttctagaaaaaaggagataatgtttttaaatttcattatcaaacttgggcaattctgtttgtgtaactccccgactagtggatgggagagtcccattgctaaaattcagctactcagataaattcagaatgggtcaaggcacctgcctgtttttgttggtgcacagagattgacttgattcagagagacaattcactccatccctatggcagaggaatgggttagccctaatgtagaatgtcattgtttttaaaactgttttatatcttaagagtgccttattaaagtatagatgtatgtcttaaaatgtgggtgataggaattttaaagatttatataatgcatcaaaagccttagaataagaaaagctttttttaaattgctttatctgtatatctgaactcttgaaacttatagctaaaacactaggatttatctgcagtgttcagggagataattctgcctttaattgtctaaaacaaaaacaaaaccagccaacctatgttacacgtgagattaaaaccaattttttccccattttttctccttttttctcttgctgcccacattgtgcctttattttatgagccccagttttctgggcttagtttaaaaaaaaaatcaagtctaaacattgcatttagaaagcttttgttcttggataaaaagtcatacactttaaaaaaaaaaaaaactttttccaggaaaatatattgaaatcatgctgctgagcctctattttctttctttgatgttttgattcagtattcttttatcataaatttttagcatttaaaaattcactgatgtacattaagccaataaactgctttaatgaataac

SEQ ID NO: 7973 - protein, 1657 aa, Homo sapiens; identical to SEQ ID NO: 1100

SEQ ID NO: 7974 - DNA, 7233 bp, Homo sapiens
gacggcacggggcggggcctcggggaccccggcaagcccgcgcacttggcaggagctgtagctaccgccgtccgcgcctccaaggtttcacggcttcctcagcagagactcgggctcgtccgccatgtccgccgcagacgaggttgacgggctgggcgtggcccggccgcactatggctctgtcctggataatgaaagacttactgcagaggagatggatgaaaggagacgtcagaacgtggcttatgagtacctttgtcatttggaagaagcgaagaggtggatggaagcatgcctaggggaagatctgcctcccaccacagaactggaggaggggcttaggaatggggtctaccttgccaaactggggaacttcttctctcccaaagtagtgtccctgaaaaaaatctatgatcgagaacagaccagatacaaggcgactggcctccactttagacacactgataatgtgattcagtggttgaatgccatggatgagattggattgcctaagattttttacccagaaactacagatatctatgatcgaaagaacatgccaagatgtatctactgtatccatgcactcagtttgtacctgttcaagctaggcctggcccctcagattcaagacctatatggaaaggttgacttcacagaagaagaaatcaacaacatgaagactgagttggagaagtatggcatccagatgcctgcctttagcaagattgggggcatcttggctaatgaactgtcagtggatgaagccgcattacatgctgctgttattgctattaatgaagctattgaccgtagaattccagccgacacatttgcagctttgaaaaatccgaatgccatgcttgtaaatcttgaagagcccttggcatccacttaccaggatatactttaccaggctaagcaggacaaaatgacaaatgctaaaaacaggacagaaaactcagagagagaaagagatgtttatgaggagctgctcacgcaagctgaaattcaaggcaatataaacaaagtcaatacattttctgcattagcaaatatcgacctggctttagaacaaggagatgcactggccttgttcagggctctgcagtcaccagccctggggcttcgaggactgcagcaacagaatagcgactggtacttgaagcagctcctgagtgataaacagcagaagagacagagtggtcagactgaccccctgcagaaggaggagctgcagtctggagtggatgctgcaaacagtgctgcccagcaatatcagagaagattggcagcagtagcactgattaatgctgcaatccagaagggtgttgctgagaagactgttttggaactgatgaatcccgaagcccagctgccccaggtgtatccatttgccgccgatctctatcagaaggagctggctaccctgcagcgacaaagtcctgaacataatctcacccacccagagctctctgtcgcagtggagatgttgtcatcggtggccctgatcaacagggcattggaatcaggagatgtgaatacagtgtggaagcaattgagcagttcagttactggtcttaccaatattgaggaagaaaactgtcagaggtatctcgatgagttgatgaaactgaaggctcaggcacatgcagagaataatgaattcattacatggaatgatatccaagcttgcgtggaccatgtgaacctggtggtgcaagaggaacatgagaggattttagccattggtttaattaatgaagccctggatgaaggtgatgcccaaaagactctgcaggccctacagattcctgcagctaaacttgagggagtccttgcagaagtggcccagcattaccaagacacgctgattagagcgaagagagagaaagcccaggaaatccaggatgagtcagctgtgttatggttggatgaaattcaaggtggaatctggcagtccaacaaagacacccaagaagcacagaagtttgccttaggaatctttgccattaatgaggcagtagaaagtggtgatgttggcaaaacactgagtgcccttcgctcccctgatgttggcttgtatggagtcatccctgagtgtggtgaaacttaccacagtgatcttgctgaagccaagaagaaaaaactggcagtaggagataataacagcaagtgggtgaagcactgggtaaaaggtggatattattattaccacaatctggagacccaggaaggaggatgggatgaacctccaaattttgtgcaaaattctatgcagctttctcgggaggagatccagagttctatctctggggtgactgccgcatataaccgagaacagctgtggctggccaatgaaggcctgatcaccaggctgcaggctcgctgccgtggatacttagttcgacaggaattccgatccaggatgaatttcctgaagaaacaaatccctgccatcacctgcattcagtcacagtggagaggatacaagcagaagaaggcatatcaagatcggttagcttacctgcgctcccacaaagatgaagttgtaaagattcagtccctggcaaggatgcaccaagctcgaaagcgctatcgagatcgcctgcagtacttccgggaccatataaatgacattatcaaaatccaggcttttattcgggcaaacaaagctcgggatgactacaagactctcatcaatgctgaggatcctcctatggttgtggtccgaaaatttgtccacctgctggaccaaagtgaccaggattttcaggaggagcttgaccttatgaagatgcgggaagaggttatcaccctcattcgttctaaccagcagctggagaatgacctcaatctcatggatatcaaaattggactgctagtgaaaaataagattacgttgcaggatgtggtttcccacagtaaaaaacttaccaaaaaaaataaggaacagttgtctgatatgatgatgataaataaacagaagggaggtctcaaggctttgagcaaggagaagagagagaagttggaagcttaccagcacctgttttatttattgcaaaccaatcccacctatctggccaagctcatttttcagatgccccagaacaagtccaccaagttcatggactctgtaatcttcacactctacaactacgcgtccaaccagcgagaggagtacctgctcctgcggctctttaagacagcactccaagaggaaatcaagtcgaaggtagatcagattcaagagattgtgacaggaaatcctacggttattaaaatggttgtaagtttcaaccgtggtgcccgtggccagaatgccctgagacagatcttggccccagtcgtgaaggaaattatggatgacaaatctctcaacatcaaaactgaccctgtggatatttacaaatcttgggttaatcagatggagtctcagacaggagaggcaagcaaactgccctatgatgtgacccctgagcaggcgctagctcatgaagaagtgaagacacggctagacagctccatcaggaacatgcgggctgtgacagacaagtttctctcagccattgtcagctctgtggacaaaatcccttatgggatgcgcttcattgccaaagtgctgaaggactcgttgcatgagaagttccctgatgctggtgaggatgagctgctgaagattattggtaacttgctttattatcgatacatgaatccagccattgttgctcctgatgcctttgacatcattgacctgtcagcaggaggccagcttaccacagaccaacgccgaaatctgggctccattgcaaaaatgcttcagcatgctgcttccaataagatgtttctgggagataatgcccacttaagcatcattaatgaatatctttcccagtcctaccagaaattcagacggtttttccaaactgcttgtgatgtcccagagcttcaggataaatttaatgtggatgagtactctgatttagtaaccctcaccaaaccagtaatctacatttccattggtgaaatcatcaacacccacactctcctgttggatcaccaggatgccattgctccggagcacaatgatccaatccacgaactgctggacgacctcggcgaggtgcccaccatcgagtccctgataggggaaagctctggcaatttaaatgacccaaataaggaggcactggctaagacggaagtgtctctcaccctgaccaacaagttcgacgtgcctggagatgagaatgcagaaatggatgctcgaaccatcttactgaatacaaaacgtttaattgtggatgtcatccggttccagccaggagagaccttgactgaaatcctagaaacaccagccaccagtgaacaggaagcagaacatcagagagccatgcagagacgtgctatccgtgatgccaaaacacctgacaagatgaaaaagtcaaaatctgtaaaggaagacagcaacctcactcttcaagagaagaaagagaagatccagacaggtttaaagaagctaacagagcttggaaccgtggacccaaagaacaaataccaggaactgatcaacgacattgccagggatattcggaatcagcggaggtaccgacagaggagaaaggccgaactagtgaaactgcaacagacatacgctgctctgaactctaaggccaccttttatggggagcaggtggattactataaaagctatatcaaaacctgcttggataacttagccagcaagggcaaagtctccaaaaagcctagggaaatgaaaggaaagaaaagcaaaaagatttctctgaaatatacagcagcaagactacatgaaaaaggagttcttctggaaattgaggacctgcaagtgaatcagtttaaaaatgttatatttgaaatcagtccaacagaagaagttggagacttcgaagtgaaagccaaattcatgggagttcaaatggagacttttatgttacattatcaggacctgctgcagctacagtatgaaggagttgcagtcatgaaattatttgatagagctaaagtaaatgtcaacctcctgatcttccttctcaacaaaaagttctacgggaagtaattgatcgtttgctgccagcccagaaggatgaaggaaagaagcacctcacagctcctttctaggtccttctttcctcattggaagcaaagacctagccaacaacagcacctcaatctgatacactcccgatgccacatttttaactcctctcgctctgatgggacatttgttacccttttttcatagtgaaattgtgtttcaggcttagtctgacctttctggtttcttcattttcttccattacttaggaaagagtggaaactccactaaaatttctctgtgttgttacagtcttagaggttgcagtactatattgtaagctttggtgtttgtttaattagcaatagggatggtaggattcaaatgtgtgtcatttagaagtggaagctattagcaccaatgacataaatacatacaagacacacaactaaaatgtcatgttattaacagttattaggttgtcatttaaaaataaagttcctttatatttctgtcccatcaggaaaactgaaggatatggggaatcattggttatcttccattgtgtttttctttatggacaggagctaatggaagtgacagtcatgttcaaaggaagcatttctagaaaaaaggagataatgtttttaaatttcattatcaaacttgggcaattctgtttgtgtaactccccgactagtggatgggagagtcccattgctaaaattcagctactcagataaattcagaatgggtcaaggcacctgcctgtttttgttggtgcacagagattgacttgattcagagagacaattcactccatccctatggcagaggaatgggttagccctaatgtagaatgtcattgtttttaaaactgttttatatcttaagagtgccttattaaagtatagatgtatgtcttaaaatgtgggtgataggaattttaaagatttatataatgcatcaaaagccttagaataagaaaagctttttttaaattgctttatctgtatatctgaactcttgaaacttatagctaaaacactaggatttatctgcagtgttcagggagataattctgcctttaattgtctaaaacaaaaacaaaaccagccaacctatgttacacgtgagattaaaaccaattttttccccattttttctccttttttctcttgctgcccacattgtgcctttattttatgagccccagttttctgggcttagtttaaaaaaaaaatcaagtctaaacattgcatttagaaagcttttgttcttggataaaaagtcatacactttaaaaaaaaaaaaaactttttccaggaaaatatattgaaatcatgctgctgagcctctattttctttctttgatgttttgattcagtattcttttatcataaatttttagcatttaaaaattcactgatgtacattaagccaataaactgctttaatgaataacaaactatgtagtgtgtccctattataaatgcattggagaagtatttttatgagactctttactcaggtgcatggttacagcccacagggaggcatggagtgccatggaaggattcgccactacccagaccttgttttttgttgtattttggaagacaggttttttaaagaaacattttcctcagattaaaagatgatgctattacaactagcattgcctcaaaaactgggaccaaccaaagtgtgtcaaccctgtttccttaaaagaggctatgaatcccaaaggccacatccaagacaggcaataatgagcagagtttacagctcctttaataaaatgtgtcagtaattttaaggtttatagttccctcaacacaattgctaatgcagaatagtgtaaaatgcgcttcaagaatgttgatgatgatgatatagaattgtggctttagtagcacagaggatgccccaacaaactcatggcgttgaaaccacacagttctcattactgttatttattagctgtagcattctctgtctcctctctctcctcctttgaccttctcctcgaccagccatcatgacatttaccatgaatttacttcctcccaagagtttggactgcccgtcagattgttgctgcacatagttgcctttgtatctctgtatgaaataaaaggtcatttgttcatgtt

SEQ ID NO: 7975 - protein, 1657 aa, Homo sapiens; identical to SEQ ID NO: 1100

SEQ ID NO: 7976 - DNA, 626 bp, Homo sapiens
ggaccccggcaagcccgcgcacttggcaggagctgtagctaccgccgtccgcgcctccaaggtttcacggcttcctcagcagagactcgggctcgtccgccatgtccgccgcagacgaggttgacgggctgggcgtggcccggccgcactatggctctgtcctggataatgaaagacttactgcagaggagatggatgaaaggagacgtcagaacgtggcttatgagtacctttgtcatttggaagaagcgaagaggtaaagattggctggctggagagaagattaagagaagggaactgataatagtgtgaatacaaataaagattgctttgaggctgaacacagtggtccatgcctgtaatcccaacacgttgggaggccgaggtgggggggaatcacttgaacccagctgtttgagaccagattgggcaacatagtgacaccccatctctacaaaaaaattttaaaaattagccaggcatggtggtgcatgccagtagtcctagctactcgggagcctgaggagggaggatcacttgagtccgggaggtcgaggcagcagtgagccgtgctctcaccactgtgctctagcctgggtgacaaaactcctgtttttggtgggggg

SEQ ID NO: 7977 - protein, 53 aa, Homo sapiens
MALSWIMKDLLQRRWMKGDVRTWLMSTFVIWKKRRGKDWLAGEKIKRRELIIV

SEQ ID NO: 7978 - DNA, 995 bp, Homo sapiens
ggaccccggcaagcccgcgcacttggcaggagctgtagctaccgccgtccgcgcctccaaggtttcacggcttcctcagcagagactcgggctcgtccgccatgtccgccgcagacgaggttgacgggctgggcgtggcccggccgcactatggctctgtcctggataatgaaagacttactgcagaggagatggatgaaaggagacgtcagaacgtggcttatgagtacctttgtcatttggaagaagcgaagaggtggatggaagcatgcctaggggaagatctgcctcccaccacagaactggaggaggggcttaggaatggggtctaccttgccaaactggggaacttcttctctcccaaagtagtgtccctgaaaaaaatctatgatcgagaacagaccagatacaaggcgactggcctccactttagacacactgataatgtgattcagtggttgaatgccatggatgagattggattgcctaagattttttacccagaaactacagatatctatgatcgaaagaacatgccaagatgtatctactgtatccatgcactcagtttgtacctgttcaagctaggcctggcccctcagattcaagacctatatggaaaggttgacttcacagaagaagaaatcaacaacatgaagactgagttggagaagtatggcatccagatgcctgcctttagcaagattgggggcatcttggctaatgaactgtcagtggatgaagccgcattacatgctgctgttattgctattaatgaagctattgaccgtagaattccagccgacacatttgcagctttgaaaaatccgaatgccatgcttgtaaatcttgaagagcccttggcatccacttaccaggatatactttaccaggctaagcaggacaaaatgacaaatgctaaaaacaggacagaaaactcagagagagaaagagatgtttatgaggagctgctcacgcaagctgaaattcaaggc

SEQ ID NO: 7979 - protein, 297 aa, Homo sapiens
MSAADEVDGLGVARPHYGSVLDNERLTAEEMDERRRQNVAYEYLCHLEEAKRWMEACLGEDLPPTTELEEGLRNGVYLAKLGNFFSPKVVSLKKIYDREQTRYKATGLHFRHTDNVIQWLNAMDEIGLPKIFYPETTDIYDRKNMPRCIYCIHALSLYLFKLGLAPQIQDLYGKVDFTEEEINNMKTELEKYGIQMPAFSKIGGILANELSVDEAALHAAVIAINEAIDRRIPADTFAALKNPNAMLVNLEEPLASTYQDILYQAKQDKMTNAKNRTENSERERDVYEELLTQAEIQ

SEQ ID NO: 7980 - DNA, 2915 bp, Homo sapiens
ggaccccggcaagcccgcgcacttggcaggagctgtagctaccgccgtccgcgcctccaaggtttcacggcttcctcagcagagactcgggctcgtccgccatgtccgccgcagacgaggttgacgggctgggcgtggcccggccgcactatggctctgtcctggataatgaaagacttactgcagaggagatggatgaaaggagacgtcagaacgtggcttatgagtacctttgtcatttggaagaagcgaagaggtggatggaagcatgcctaggggaagatctgcctcccaccacagaactggaggaggggcttaggaatggggtctaccttgccaaactggggaacttcttctctcccaaagtagtgtccctgaaaaaaatctatgatcgagaacagaccagatacaaggcgactggcctccactttagacacactgataatgtgattcagtggttgaatgccatggatgagattggattgcctaagattttttacccagaaactacagatatctatgatcgaaagaacatgccaagatgtatctactgtatccatgcactcagtttgtacctgttcaagctaggcctggcccctcagattcaagacctatatggaaaggttgacttcacagaagaagaaatcaacaacatgaagactgagttggagaagtatggcatccagatgcctgcctttagcaagattgggggcatcttggctaatgaactgtcagtggatgaagccgcattacatgctgctgttattgctattaatgaagctattgaccgtagaattccagccgacacatttgcagctttgaaaaatccgaatgccatgcttgtaaatcttgaagagcccttggcatccacttaccaggatatactttaccaggctaagcaggacaaaatgacaaatgctaaaaacaggacagaaaactcagagagagaaagagatgtttatgaggagctgctcacgcaagctgaaattcaaggcaatataaacaaagtcaatacattttctgcattagcaaatatcgacctggctttagaacaaggagatgcactggccttgttcagggctctgcagtcaccagccctggggcttcgaggactgcagcaacagaatagcgactggtacttgaagcagctcctgagtgataaacagcagaagagacagagtggtcagactgaccccctgcagaaggaggagctgcagtctggagtggatgctgcaaacagtgctgcccagcaatatcagagaagattggcagcagtagcactgattaatgctgcaatccagaagggtgttgctgagaagactgttttggaactgatgaatcccgaagcccagctgccccaggtgtatccatttgccgccgatctctatcagaaggagctggctaccctgcagcgacaaagtcctgaacataatctcacccacccagagctctctgtcgcagtggagatgttgtcatcggtggccctgatcaacagggcattggaatcaggagatgtgaatacagtgtggaagcaattgagcagttcagttactggtcttaccaatattgaggaagaaaactgtcagaggtatctcgatgagttgatgaaactgaaggctcaggcacatgcagagaataatgaattcattacatggaatgatatccaagcttgcgtggaccatgtgaacctggtggtgcaagaggaacatgagaggattttagccattggtttaattaatgaagccctggatgaaggtgatgcccaaaagactctgcaggccctacagattcctgcagctaaacttgagggagtccttgcagaagtggcccagcattaccaagacacgctgattagagcgaagagagagaaagcccaggaaatccaggatgagtcagctgtgttatggttggatgaaattcaaggtggaatctggcagtccaacaaagacacccaagaagcacagaagtttgccttaggaatctttgccattaatgaggcagtagaaagtggtgatgttggcaaaacactgagtgcccttcgctcccctgatgttggcttgtatggagtcatccctgagtgtggtgaaacttaccacagtgatcttgctgaagccaagaagaaaaaactggcagtaggagataataacagcaagtgggtgaagcactgggtaaaaggtggatattattattaccacaatctggagacccaggaaggaggatgggatgaacctccaaattttgtgcaaaattctatgcagctttctcgggaggagatccagagttctatctctggggtgactgccgcatataaccgagaacagctgtggctggccaatgaaggcctgatcaccaggctgcaggctcgctgccgtggatacttagttcgacaggaattccgatccaggatgaatttcctgaagaaacaaatccctgccatcacctgcattcagtcacagtggagaggatacaagcagaagaaggcatatcaagatcggttagcttacctgcgctcccacaaagatgaagttgtaaagattcagtccctggcaaggatgcaccaagctcgaaagcgctatcgagatcgcctgcagtacttccgggaccatataaatgacattatcaaaatccaggcttttattcgggcaaacaaagctcgggatgactacaagactctcatcaatgctgaggatcctcctatggttgtggtccgaaaatttgtccacctgctggaccaaagtgaccaggattttcaggaggagcttgaccttatgaagatgcgggaagaggttatcaccctcattcgttctaaccagcagctggagaatgacctcaatctcatggatatcaaaattggactgctagtgaaaaataagattacgttgcaggatgtggtttcccacagtaaaaaacttacc

SEQ ID NO: 7981 - protein, 937 aa, Homo sapiens
MSAADEVDGLGVARPHYGSVLDNERLTAEEMDERRRQNVAYEYLCHLEEAKRWMEACLGEDLPPTTELEEGLRNGVYLAKLGNFFSPKVVSLKKIYDREQTRYKATGLHFRHTDNVIQWLNAMDEIGLPKIFYPETTDIYDRKNMPRCIYCIHALSLYLFKLGLAPQIQDLYGKVDFTEEEINNMKTELEKYGIQMPAFSKIGGILANELSVDEAALHAAVIAINEAIDRRIPADTFAALKNPNAMLVNLEEPLASTYQDILYQAKQDKMTNAKNRTENSERERDVYEELLTQAEIQGNINKVNTFSALANIDLALEQGDALALFRALQSPALGLRGLQQQNSDWYLKQLLSDKQQKRQSGQTDPLQKEELQSGVDAANSAAQQYQRRLAAVALINAAIQKGVAEKTVLELMNPEAQLPQVYPFAADLYQKELATLQRQSPEHNLTHPELSVAVEMLSSVALINRALESGDVNTVWKQLSSSVTGLTNIEEENCQRYLDELMKLKAQAHAENNEFITWNDIQACVDHVNLVVQEEHERILAIGLINEALDEGDAQKTLQALQIPAAKLEGVLAEVAQHYQDTLIRAKREKAQEIQDESAVLWLDEIQGGIWQSNKDTQEAQKFALGIFAINEAVESGDVGKTLSALRSPDVGLYGVIPECGETYHSDLAEAKKKKLAVGDNNSKWVKHWVKGGYYYYHNLETQEGGWDEPPNFVQNSMQLSREEIQSSISGVTAAYNREQLWLANEGLITRLQARCRGYLVRQEFRSRMNFLKKQIPAITCIQSQWRGYKQKKAYQDRLAYLRSHKDEVVKIQSLARMHQARKRYRDRLQYFRDHINDIIKIQAFIRANKARDDYKTLINAEDPPMVVVRKFVHLLDQSDQDFQEELDLMKMREEVITLIRSNQQLENDLNLMDIKIGLLVKNKITLQDVVSHSKKL

SEQ ID NO: 7982 - DNA, 481 bp, Homo sapiens
aaaagaaaagaaaaaattcaggatatcctttatccaggtgcttggataaaagtttattgagttcaggccgggcgcgtgagccaccgggccaggtcagttactccttaagtatgcaaaagcactcaacaaaaaaacacctcaggggatcatgcctgctgggtggtctttaaaggaaatgggctactttcctatactggaaaaaaacacctgacagaaaaaaagacgctctagagtagctgaaaataaaatgcctggctaatgcagaacctgatgaagaaataggatgaagtgtaacattctactgaggtcatgatatcccagcataaggcagagttttaaatcttgtttctcaacagggggaggagtgggggccaaggaaggagcatcggaatcactagagacatttaaaatacagtcggccctccttatccatgggttctgcatccatggattcaacaaactatggatcaaaaacagtcag

SEQ ID NO: 7983 - protein, 55 aa, Homo sapiens
YPSIRQSFKSCFSTGGGVGAKEGASESLETFKIQSALLIHGFCIHGFNKLWIKNS

SEQ ID NO: 7984 - DNA, 572 bp, Homo sapiens
tggagggatggcccgtgcccttgttcccctgtcactgctggaagtggtccttcctaaaacttcatcatgaaattgcacttggatcatgtatcaagatgaaagtttttttttaacttccattgatgcttgggaagtaatatgtcttctgtaacatttgactgtttcagtcacagtggagaggatacaagcagaagaaggcatatcaagatcggttagcttacctgcgctcccacaaagatgaagttgtaaaggtatggtagcctgaacagggtttctccatgaggggcacaggtataacacgtgttgagatgaaggactcttctaatttccaggatcccttttccacagattcagtccctggcaaggatgcaccaagctcgaaagcgctatcgagatcgcctgcagtacttccgggaccatataaatgacattatcaaaatccaggcttttattcgggcaaacaaagctcgggatgactacaagactctcagtgagtaactggctccgcatgaagagttgaggcagtggctgggagccaccaagttcagggtattctccacagacctcttttg

SEQ ID NO: 7985 - protein, 49 aa, Homo sapiens
MRGTGITRVEMKDSSNFQDPFSTDSVPGKDAPSSKALSRSPAVLPGPYK

SEQ ID NO: 7986 - DNA, 695 bp, Homo sapiens
aaggcttgggggagagggtgtgacctgtgacataagcccctttgctaacatgtggctaggtgtcttgttggcttgttgcattaacctttatcataacatagcaatagcctgacacagaagactgcacctgatagttgtcttagcacatctcaaaattaaatgtttatgaatagactactttttcaagacaatgctatttcctgagacgtagtactttttctgctaactccattctttgatgcatactttctgtcagtcaatgctgaggatcctcctatggttgtggtccgaaaatttgtccacctgctggaccaaagtgaccaggattttcaggaggagcttgaccttatgaagatgcgggaagaggttatcaccctcattcgttctaaccagcagctggagaatgacctcaatctcatggatatcaaaattggactgctagtgaaaaataagattacgttgcaggtatggcccagtgccagcgggggccttggaacggttcatcctgctttgtaacccctgcattcccctttctgactggtggggagggtggaggctgactttctcctcagctactgccataagagctttttttttttcttttgactgagtctcactctgttgcccaggttgcagtgagccaagattgcatgactgcactccggactgggtgacagagtgaaactctatctcca

SEQ ID NO: 7987 - protein, 79 aa, Homo sapiens [sequence omitted]

SEQ ID NO: 7988 - DNA, 2988 bp, Homo sapiens
cttgcagggtagtttattatttattcctaactttttattttaagagttttcaaatctcagatcgaatgaatagaacaataagcacccatgtgcccttcacctagattcacccatttttaatattttgccatatctgcttcccatttccctggctcttgcatgtcctctgtttctctctttccatggaagactctctggggtcaggcatgggtgatggaagggatgaaaaacaggcccacctaaccctgcttgcagatctgactcctgtgagcttttgatgtgttttcattgttccttgtgcacttcctgactttctgacacaagatgtttcatgttcaacctgtagtttcccctccccagggccagaatgaactgtttctccaagcatgcctggtttctttgaatgaagaatggtatttagaaaccaagatctagaactaggtgtgttcactgccagatttgtcatggcctccaggccttctaagcagacagacctagattctcatttttttttaatgctgcatattattccattatgcagatagatataacagttgacttcagcagttctccattgatggacatttaagttgtttccagttgtttgttattattttttaaattctgcagcaaataacctcttgtacatatgtcattttgcaaatgtgggcatatttctgaagttagcacttcttgccttgattatcctaatagcctcctaacctgtttctttttccttattttcattcatctgtaattgctgtgctggcttaaacgcttttaaaaagtatttgatgacattttaattttttccctacacagctgaggggcgtagagtaactccttcactcctgggattcagtaccattccctcagctggcatacgaagctctcctagttacttgttaggtacttaagttcccagaaggacatgggaggattaagacactgttaaattcatgggagtgttctcaaatataatttaaactaaaaatagaagcaatttagtaatatttcccctgttttgcagagatattgcttaggctaattctaacatttgtttgccattttagagttggtatgttacttatgcttatgtctggaagtttggtttctgacatgtttccttcagttaccaatgatgaagattcagagtagatggttacttatagaaagtgacatgatgtgatttttacagagtctccaaaaagcctagggaaatgaaaggaaagaaaagcaaaaagatttctctgaaatatacagcagcaagactacatgaaaaaggagttcttctggaaattgaggacctgcaagtgaatcagtttaaaaatgttatatttgaaatcagtccaacagaagaagttggagacttcgaagtgaaagccaaattcatgggagttcaaatggagacttttatgttacattatcaggacctgctgcagctacagtatgaaggagttgcagtcatgaaattatttgatagagctaaagtaaatgtcaacctcctgatcttccttctcaacaaaaagttctacgggaagtaattgatcgtttgctgccagcccagaaggatgaaggaaagaagcacctcacagctcctttctaggtccttctttcctcattggaagcaaagacctagccaacaacagcacctcaatctgatacactcccgatgccacatttttaactcctctcgctctgatgggacatttgttacccttttttcatagtgaaattgtgtttcaggcttagtctgacctttctggtttcttcattttcttccattacttaggaaagagtggaaactccactaaaatttctctgtgttgttacagtcttagaggttgcagtactatattgtaagctttggtgtttgtttaattagcaatagggatggtaggattcaaatgtgtgtcatttagaagtggaagctattagcaccaatgacataaatacatacaagacacacaactaaaatgtcatgttattaacagttattaggttgtcatttaaaaataaagttcctttatatttctgtcccatcaggaaaactgaaggatatggggaatcattggttatcttccattgtgtttttctttatggacaggagctaatggaagtgacagtcatgttcaaaggaagcatttctagaaaaaaggagataatgtttttaaatttcattatcaaacttgggcaattctgtttgtgtaactccccgactagtggatgggagagtcccattgctaaaattcagctactcagataaattcagaatgggtcaaggcacctgcctgtttttgttggtgcacagagattgacttgattcagagagacaattcactccatccctatggcagaggaatgggttagccctaatgtagaatgtcattgtttttaaaactgttttatatcttaagagtgccttattaaagtatagatgtatgtcttaaaatgtgggtgataggaattttaaagatttatataatgcatcaaaagccttagaataagaaaagctttttttaaattgctttatctgtatatctgaactcttgaaacttatagctaaaacactaggatttatctgcagtgttcagggagataattctgcctttaattgtctaaaacaaaaacaaaaccagccaacctatgttacacgtgagattaaaaccaattttttccccattttttctccttttttctcttgctgcccacattgtgcctttattttatgagccccagttttctgggcttagtttaaaaaaaaaatcaagtctaaacattgcatttagaaagcttttgttcttggataaaaagtcatacactttaaaaaaaaaaaaaactttttccaggaaaatatattgaaatcatgctgctgagcctctattttctttctttgatgttttgattcagtattcttttatcataaatttttagcatttaaaaattcactgatgtacattaagccaataaactgctttaatgaataac

SEQ ID NO: 7989 - protein, 107 aa, Homo sapiens
MKGKKSKKISLKYTAARLHEKGVLLEIEDLQVNQFKNVIFEISPTEEVGDFEVKAKFMGVQMETFMLHYQDLLQLQYEGVAVMKLFDRAKVNVNLLIFLLNKKFYGK

SEQ ID NO: 7990 - DNA, 3679 bp, Homo sapiens
cttgcagggtagtttattatttattcctaactttttattttaagagttttcaaatctcagatcgaatgaatagaacaataagcacccatgtgcccttcacctagattcacccatttttaatattttgccatatctgcttcccatttccctggctcttgcatgtcctctgtttctctctttccatggaagactctctggggtcaggcatgggtgatggaagggatgaaaaacaggcccacctaaccctgcttgcagatctgactcctgtgagcttttgatgtgttttcattgttccttgtgcacttcctgactttctgacacaagatgtttcatgttcaacctgtagtttcccctccccagggccagaatgaactgtttctccaagcatgcctggtttctttgaatgaagaatggtatttagaaaccaagatctagaactaggtgtgttcactgccagatttgtcatggcctccaggccttctaagcagacagacctagattctcatttttttttaatgctgcatattattccattatgcagatagatataacagttgacttcagcagttctccattgatggacatttaagttgtttccagttgtttgttattattttttaaattctgcagcaaataacctcttgtacatatgtcattttgcaaatgtgggcatatttctgaagttagcacttcttgccttgattatcctaatagcctcctaacctgtttctttttccttattttcattcatctgtaattgctgtgctggcttaaacgcttttaaaaagtatttgatgacattttaattttttccctacacagctgaggggcgtagagtaactccttcactcctgggattcagtaccattccctcagctggcatacgaagctctcctagttacttgttaggtacttaagttcccagaaggacatgggaggattaagacactgttaaattcatgggagtgttctcaaatataatttaaactaaaaatagaagcaatttagtaatatttcccctgttttgcagagatattgcttaggctaattctaacatttgtttgccattttagagttggtatgttacttatgcttatgtctggaagtttggtttctgacatgtttccttcagttaccaatgatgaagattcagagtagatggttacttatagaaagtgacatgatgtgatttttacagagtctccaaaaagcctagggaaatgaaaggaaagaaaagcaaaaagatttctctgaaatatacagcagcaagactacatgaaaaaggagttcttctggaaattgaggacctgcaagtgaatcagtttaaaaatgttatatttgaaatcagtccaacagaagaagttggagacttcgaagtgaaagccaaattcatgggagttcaaatggagacttttatgttacattatcaggacctgctgcagctacagtatgaaggagttgcagtcatgaaattatttgatagagctaaagtaaatgtcaacctcctgatcttccttctcaacaaaaagttctacgggaagtaattgatcgtttgctgccagcccagaaggatgaaggaaagaagcacctcacagctcctttctaggtccttctttcctcattggaagcaaagacctagccaacaacagcacctcaatctgatacactcccgatgccacatttttaactcctctcgctctgatgggacatttgttacccttttttcatagtgaaattgtgtttcaggcttagtctgacctttctggtttcttcattttcttccattacttaggaaagagtggaaactccactaaaatttctctgtgttgttacagtcttagaggttgcagtactatattgtaagctttggtgtttgtttaattagcaatagggatggtaggattcaaatgtgtgtcatttagaagtggaagctattagcaccaatgacataaatacatacaagacacacaactaaaatgtcatgttattaacagttattaggttgtcatttaaaaataaagttcctttatatttctgtcccatcaggaaaactgaaggatatggggaatcattggttatcttccattgtgtttttctttatggacaggagctaatggaagtgacagtcatgttcaaaggaagcatttctagaaaaaaggagataatgtttttaaatttcattatcaaacttgggcaattctgtttgtgtaactccccgactagtggatgggagagtcccattgctaaaattcagctactcagataaattcagaatgggtcaaggcacctgcctgtttttgttggtgcacagagattgacttgattcagagagacaattcactccatccctatggcagaggaatgggttagccctaatgtagaatgtcattgtttttaaaactgttttatatcttaagagtgccttattaaagtatagatgtatgtcttaaaatgtgggtgataggaattttaaagatttatataatgcatcaaaagccttagaataagaaaagctttttttaaattgctttatctgtatatctgaactcttgaaacttatagctaaaacactaggatttatctgcagtgttcagggagataattctgcctttaattgtctaaaacaaaaacaaaaccagccaacctatgttacacgtgagattaaaaccaattttttccccattttttctccttttttctcttgctgcccacattgtgcctttattttatgagccccagttttctgggcttagtttaaaaaaaaaatcaagtctaaacattgcatttagaaagcttttgttcttggataaaaagtcatacactttaaaaaaaaaaaaaactttttccaggaaaatatattgaaatcatgctgctgagcctctattttctttctttgatgttttgattcagtattcttttatcataaatttttagcatttaaaaattcactgatgtacattaagccaataaactgctttaatgaataacaaactatgtagtgtgtccctattataaatgcattggagaagtatttttatgagactctttactcaggtgcatggttacagcccacagggaggcatggagtgccatggaaggattcgccactacccagaccttgttttttgttgtattttggaagacaggttttttaaagaaacattttcctcagattaaaagatgatgctattacaactagcattgcctcaaaaactgggaccaaccaaagtgtgtcaaccctgtttccttaaaagaggctatgaatcccaaaggccacatccaagacaggcaataatgagcagagtttacagctcctttaataaaatgtgtcagtaattttaaggtttatagttccctcaacacaattgctaatgcagaatagtgtaaaatgcgcttcaagaatgttgatgatgatgatatagaattgtggctttagtagcacagaggatgccccaacaaactcatggcgttgaaaccacacagttctcattactgttatttattagctgtagcattctctgtctcctctctctcctcctttgaccttctcctcgaccagccatcatgacatttaccatgaatttacttcctcccaagagtttggactgcccgtcagattgttgctgcacatagttgcctttgtatctctgtatgaaataaaaggtcatttgttcatgtt

SEQ ID NO: 7991 - protein, 107 aa, Homo sapiens; identical to SEQ ID NO: 7989

SEQ ID NO: 7992 - DNA, 2876 bp, Homo sapiens
ttatctttggtaatactgagtgtgcttatatacacagcacctactctttctagaaaacctcctcccttggtgctttttatacggacccccttttgtttatttacttctcccagtcctcaaacatgcatgtattcaaacacatacaccctctccttccccagtgtcctccgttttctccttttatcattaggtttcctttttggccatgtggaagtgaagagaattcctatgatgtcatcccttcacacgccacttgtggaactcctcagtggttcctctttgataggatgtaagtgctgcaggcagagagaggttgccattcctctctccaagtcccagagcagatggtacttgggcttggcaatctgtgctgcttcagctgcagaagtacttttgacctgtattttctgcagcccttttcactcttgaagacttggttcatctcctttccccatttcacagaatatttttatatgagaatataaaaaccatacccttacgatgttatctttcaacaggtttaaaaatgttatatttgaaatcagtccaacagaagaagttggagacttcgaagtgaaagccaaattcatgggagttcaaatggagacttttatgttacattatcaggacctgctgcagctacagtatgaaggagttgcagtcatgaaattatttgatagagctaaagtaaatgtcaacctcctgatcttccttctcaacaaaaagttctacgggaagtaattgatcgtttgctgccagcccagaaggatgaaggaaagaagcacctcacagctcctttctaggtccttctttcctcattggaagcaaagacctagccaacaacagcacctcaatctgatacactcccgatgccacatttttaactcctctcgctctgatgggacatttgttacccttttttcatagtgaaattgtgtttcaggcttagtctgacctttctggtttcttcattttcttccattacttaggaaagagtggaaactccactaaaatttctctgtgttgttacagtcttagaggttgcagtactatattgtaagctttggtgtttgtttaattagcaatagggatggtaggattcaaatgtgtgtcatttagaagtggaagctattagcaccaatgacataaatacatacaagacacacaactaaaatgtcatgttattaacagttattaggttgtcatttaaaaataaagttcctttatatttctgtcccatcaggaaaactgaaggatatggggaatcattggttatcttccattgtgtttttctttatggacaggagctaatggaagtgacagtcatgttcaaaggaagcatttctagaaaaaaggagataatgtttttaaatttcattatcaaacttgggcaattctgtttgtgtaactccccgactagtggatgggagagtcccattgctaaaattcagctactcagataaattcagaatgggtcaaggcacctgcctgtttttgttggtgcacagagattgacttgattcagagagacaattcactccatccctatggcagaggaatgggttagccctaatgtagaatgtcattgtttttaaaactgttttatatcttaagagtgccttattaaagtatagatgtatgtcttaaaatgtgggtgataggaattttaaagatttatataatgcatcaaaagccttagaataagaaaagctttttttaaattgctttatctgtatatctgaactcttgaaacttatagctaaaacactaggatttatctgcagtgttcagggagataattctgcctttaattgtctaaaacaaaaacaaaaccagccaacctatgttacacgtgagattaaaaccaattttttccccattttttctccttttttctcttgctgcccacattgtgcctttattttatgagccccagttttctgggcttagtttaaaaaaaaaatcaagtctaaacattgcatttagaaagcttttgttcttggataaaaagtcatacactttaaaaaaaaaaaaaactttttccaggaaaatatattgaaatcatgctgctgagcctctattttctttctttgatgttttgattcagtattcttttatcataaatttttagcatttaaaaattcactgatgtacattaagccaataaactgctttaatgaataacaaactatgtagtgtgtccctattataaatgcattggagaagtatttttatgagactctttactcaggtgcatggttacagcccacagggaggcatggagtgccatggaaggattcgccactacccagaccttgttttttgttgtattttggaagacaggttttttaaagaaacattttcctcagattaaaagatgatgctattacaactagcattgcctcaaaaactgggaccaaccaaagtgtgtcaaccctgtttccttaaaagaggctatgaatcccaaaggccacatccaagacaggcaataatgagcagagtttacagctcctttaataaaatgtgtcagtaattttaaggtttatagttccctcaacacaattgctaatgcagaatagtgtaaaatgcgcttcaagaatgttgatgatgatgatatagaattgtggctttagtagcacagaggatgccccaacaaactcatggcgttgaaaccacacagttctcattactgttatttattagctgtagcattctctgtctcctctctctcctcctttgaccttctcctcgaccagccatcatgacatttaccatgaatttacttcctcccaagagtttggactgcccgtcagattgttgctgcacatagttgcctttgtatctctgtatgaaataaaaggtcatttgttcatgtt

SEQ ID NO: 7993 - protein, 79 aa, Homo sapiens [sequence omitted]

SEQ ID NO: 7994 - DNA, 5209 bp, Homo sapiens
ctccggggccgcggcggctcctctgccgggtcgcgccggacgactggcttcgggcggcggccccggcggcctgtggacggacgggtgggccgaggtacaggccccacggccgccgtctcccgcttctgcccgcgcagagtccgcgccatggccgcctcgccgggctcgggcagcgccaacccgcggaagttcagtgagaagatcgcgctgcacacgcagagacaggccgaggagacgcgggccttcgagcagctcatgaccgacctcaccctgtcgcgggttcaatttcagaagcttcagcaactgcgccttacacagtaccatggaggatccttaccaaatgtgagccagctgcggagcagtgcgtcagagtttcagccgtcatttcaccaagctgataatgttcggggaacccgccatcacgggctggtggagaggccatccaggaaccgcttccaccccctccaccgaaggtctggggacaagccagggcgacaatttgatggtagtgcttttggagccaattattcctcacagcctctggatgagagttggccaaggcagcagcctccttggaaagacgaaaagcatcctgggttcaggctgacatctgcacttaacaggaccaattctgattctgctcttcacacgagtgctctgagtaccaagccccaggacccctatggaggagggggccagtcggcctggcctgccccatacatgggtttctgtgatggtgagaataatggacatggggaagtagcatctttccctggcccattgaaagaagagaatctgttaaatgttccgaagccactgccaaaacaactgtgggagaccaaggagattcagtccctgtcaggacgccctcgatcctgtgatgttggaggtggcaatgcttttccacataatggtcaaaacctaggcctctcacccttcttggggaccttgaacactggagggtcattgccagatctaaccaacctccactactcgacacccctgccagcctccctggacaccaccgaccaccactttggcagtatgagtgtggggaatagtgtgaacaacatcccagctgctatgacccacctgggtataagaagctcctctggtctccagagttctcggagtaacccctccatccaagccacgctcaataagactgtgctttcctcttccttaaataaccacccacagacatctgttcccaacgcatctgctcttcacccttcgctccgtctgttttcccttagcaacccatctctttccaccacaaacctgagcggcccgtctcggcgtcggcagcctcccgtcagccctctcacgctttctcctggccctgaagcacatcaaggtttcagcagacagctgtcttcaaccagcccactggccccatatcctacctcccagatggtgtcctcagaccgaagccaactttcctttctgcccacagaagctcaagcccaggtgtcgccgccacccccttaccctgcaccccaggagctcacccagcccctcctgcagcagccccgcgcccctgaggcccctgcccagcagccccaggcagcctcctcactgccacagtcagactttcagcttctcccggcccagggctcatctttgaccaacttcttcccagatgtgggttttgaccagcagtccatgaggccaggccctgcctttcctcaacaggtgcctctggtgcaacaaggttcccgagaactgcaggactcttttcatttgagaccaagcccgtattccaactgcgggagtctcccgaacaccatcctgccagactccagcaccagcctgttcaaagacctcaacagtgcgctggcaggcctgcctgaggtcagcctgaacgtggacactccatttccactggaagaggagctgcagattgaacccctgagcctggacggactcaacatgttaagtgactccagcatgggcctgctggacccctctgttgaagagacgtttcgagctgacagactgtgaacagaaggcagtggaacagaagaatgtttttctgcaacagccaaaatagaatggaatagaatgaagccagctgataccacgggctttcgttatcttgacatagaaggaagcaatgccacggctccagggtttcagatgagatcccatctcagacactgtggcttcctccagatcacacagctttgtactgcctctcccgcctgtggccaaagtcgtgttgcagcaggcaggctgcttggagcttcccatgaactggaaagctcacctccactgcatctttttactggccatccagtcagccgatgtgtaagagtaggaaatactgtgtcactggaggcctccgtagcattgtgtagtgtgctcagaaccactgatctccgtccgcaccgaaggcgggcccggagtgggaggctcggcctggggcggcggcaccggagagggcacctcgatgcctgctctgacctgacccagagggcgaggccctccagcgggggacattcccaggctgagtggaccccacggctctctcccacgcctggattacgacatgaagtttttaccacaagcccgagggcaggcttgagttaggcagactgaaggctaattttcattttctcccagctggtttctgctgcttcagaaaagtacaccttttccttatggaccagaggaagaggaagaccattttatcagtcactgaaaagagtcccctggcactgatgagcctgaagagaactgtgctcctcctcgggggctggggaaggaagacagggactgcaggtgtctcatactcagtggcctccagacaaactccagacaagcacagacctccccactaagagcagccagagggagctggtgaggccctaaccccacccaccgagcaactgagcttccccatccctccccagagctgtgtctctgtgggctgggagtctaatgtcacccccctagaccgtaagctccttgagggcagggacagtgccttatcattgttgaacccgtagcacctaacacgtgcgtggcagcacagtcgtgtgctggagtgagtgctgcagaaccgtgcgtgcagcgcatgatgaatgagtgcgtccgccatgccgtaaggcaggctcacctgtagctatccccttccctgccagatcttctcagagctttagcttttctagcactcgtgcctatggtgaagcatgcactttaatatgcttttaacactaggtgaccaaatcacagtgaagccgggcactgcattctccttgggctgtgctccacgcgggtgggtgggagctgtcttctgagtacatccggaagggctgagcaggtgagtgccctgagcatcctggctgggccccacccaggaagatcttccttctcagatccacgtttggctctaaattgcttcaagtagagattcattctttgaggttgaaaaaatagtttatagtaaaacgaaggcctaattcatggaagcatcattagtcatcaataccttctcataaaatagatgggccagatttccaccaccgcctgcctcctctaacttgggtgatgccagtaggtttgaagggggcagagcactgcagggggaggggggggtctaggctgtgagaggacagggtggagaggaggagaaccctgaaggagagacggaagatgccaggacctttgcttggacagccattgcccttccaggagaccctggagtgtactgagggttgctggactgttccacccagaggagcaaggctgtacaatgagggtctgaatctggcacacctgtcccttatgtaaaaggagtcgtggtcacaagaccctgggctggttagcctctcccgacctcattccatttctatcttctgaccttgcctctcatctttaaaataaccctcatggggtgcccctccaccttcctctggaatccaagtattcctgtttcacatttgccccaaatctttgctgtggaattgggaaatcaaaccagagtcctcctcgcctgatttccagctcaggaagggcctgctggcctgccctgttcccagttacactttcagatccctttgtgctcaagatctcagagggggtggctttttgttaaagagccttcagtcgcaatgctacccagcaccccatgtgccaaaagaaaccagctcctgtgtcaaagggcttccaaacctgatctcactctcaacaggcgatggtgctgatgtttcaagaattgtgtttttataaaacagaggtctcagcatagtcactcttcacatagtgccttacccatgggtatcgtcatatccgggtcccagttcagtttgtctgcacagcagccaccctgcctggcaacagagaccccaagacctacacagtgaaccctactgccccaaaggcgttctccaggtgacttgtgaaaacagacctccggggaagtgatttattgggggtgtacactgggggcaatatggtttagcactgaattcaatttgtccttaggtctatgagtgagtccgatcttttcttgtgaaaggttttgggcatcgtacaacccactctgcctagaaggtgtggaggactcaccacgggcagggtcgccctggcccacagcacgtgagcctgcactcactgcggcctttgtaacaaaaccagttgtggtcctcagcatttgaagcagctgcatacttcagagtaaactatttttcattatttagttttgtcacaagaaatcgaccattgtactactctcacttacagcagttaaacagcatagaactaaaaacctgtctgcatttccattttttctttctgtatggttgtgggttttaggacatagggggttaggagaaggggtttcttgatcatgtcatgaattctcctttgtcctgtttctcctgtttcatttctcctccgcctgctgtatattacctgagctggtgttgtatcttcaagtccatatgcgtatttgcagacctttcctgttcccactcttgttggctcttctgatttatgcacagatggttcccagcatgtgtccagtgcttcatggatgggaccatcccagcaactaatcagacttcctgccagtgtcctaacccccagggcaccctgttcaaccatatttaaaaattggaatttgtataaagttgcttccaagttttataatgcatcattttacatcttttgtaattaaaagcatcacaatgaggttgtctctgca

SEQ ID NO: 7995 - protein, 618 aa, Homo sapiens
MAASPGSGSANPRKFSEKIALHTQRQAEETRAFEQLMTDLTLSRVQFQKLQQLRLTQYHGGSLPNVSQLRSSASEFQPSFHQADNVRGTRHHGLVERPSRNRFHPLHRRSGDKPGRQFDGSAFGANYSSQPLDESWPRQQPPWKDEKHPGFRLTSALNRTNSDSALHTSALSTKPQDPYGGGGQSAWPAPYMGFCDGENNGHGEVASFPGPLKEENLLNVPKPLPKQLWETKEIQSLSGRPRSCDVGGGNAFPHNGQNLGLSPFLGTLNTGGSLPDLTNLHYSTPLPASLDTTDHHFGSMSVGNSVNNIPAAMTHLGIRSSSGLQSSRSNPSIQATLNKTVLSSSLNNHPQTSVPNASALHPSLRLFSLSNPSLSTTNLSGPSRRRQPPVSPLTLSPGPEAHQGFSRQLSSTSPLAPYPTSQMVSSDRSQLSFLPTEAQAQVSPPPPYPAPQELTQPLLQQPRAPEAPAQQPQAASSLPQSDFQLLPAQGSSLTNFFPDVGFDQQSMRPGPAFPQQVPLVQQGSRELQDSFHLRPSPYSNCGSLPNTILPDSSTSLFKDLNSALAGLPEVSLNVDTPFPLEEELQIEPLSLDGLNMLSDSSMGLLDPSVEETFRADRL

SEQ ID NO: 7996 - DNA, 698 bp, Homo sapiens
gactggcttcgggcggcggccccggcggcctgtggacggacgggtgggccgaggtacaggccccacggccgccgtctcccgcttctgcccgcgcagagtccgcgccatggccgcctcgccgggctcgggcagcgccaacccgcggaagttcagtgagaagatcgcgctgcacacgcagagacaggccgaggagacgcgggccttcgagcagctcatgaccgacctcaccctgtcgcgggttcaatttcagaagcttcagcaactgcgccttacacagtaccatggaggatccttaccaaatgtgagccagctgcggagcagtgcgtcagagtttcaggtacctccagatatgtactttcttgaagctgaatggagtgtaaaaaatagacaaagattatcactaaaaagatgagatcttgaaggataagctgggcctaggtacagttcagtcttcttttggaaagtccattaatattctctctcatagtttctacagcatacgatagtgttatttcacaaatggctgaaggcagcactggcaagtagaattataacacaagcatatgtaatttaaaatgttctagtagctacattaaagaagaagaaacacgtggggttaattttaatatctatatttttcaaaatgcagctttctcatctataattttaatattacttaaataaatgtttggctgggc

SEQ ID NO: 7997 - protein, 101 aa, Homo sapiens
MAASPGSGSANPRKFSEKIALHTQRQAEETRAFEQLMTDLTLSRVQFQKLQQLRLTQYHGGSLPNVSQLRSSASEFQVPPDMYFLEAEWSVKNRQRLSLKR

SEQ ID NO: 7998 - DNA, 1420 bp, Homo sapiens
ctggcttcgggcggcggccccggcggcctgtggacggacgggtgggccgaggtacaggccccacggccgccgtctcccgcttctgcccgcgcagagtccgcgccatggccgcctcgccgggctcgggcagcgccaacccgcggaagttcagtgagaagatcgcgctgcacacgcagagacaggccgaggagacgcgggccttcgagcagctcatgaccgacctcaccctgtcgcgggttcaatttcagaagcttcagcaactgcgccttacacagtaccatggaggatccttaccaaatgtgagccagctgcggagcagtgcgtcagagtttcaggttgagaggaacagcagtccctgtgttgatggattgaggcagtaactcgaggaggaagattttcctgcacagaactgcagaggcttggggagagagagaacacactgggatgactctgagatcctaacatgagtgtcttggtggacggtggcctcactaaatgagatggactataagaagaggaacagattaaggggacagtgattggttggatttttggtagaatttgagctgtcttgggtacttttggcagagaacttgagtaggcagttggaagtatgcacttggagttcacaaaagaactgttgggagctggaggtgtcgatttatgagttactggactgtgggtgacagtggggccgagggaaggatgcgattggccaaggcgagcatggaggacaggggctctctaccaggaagacgggcactggccctgaggctcttaggaagcgcctcctaaagctcctgtgcccggaggctcccgccaccccctccacctgctcacactctgcctggtgcccagggatcctgagagcatcctttgcctctcagagcaatgcaggcaggtgtggcctgaggctgcgaggccacaggaccccagggaacatcaggacggaaggcaaaggggcggaaaggagtgcacagagggataagaaaagatccatgtgagtgtggggatttttttttttaactttaatttttgtttccatccattgcagccacctcttctttgtttatctttttcatcatccctcctccctgccttccttttttaatgtggaaatcttccttgagccaaaggcttcactaagcttaactaaggaagcaatggaggaggcgctgatgtggttgttaaaagccctgtgacctgtgctgcccttccgctggcacgctggcacctggcagggatgccagaaatgtttcttgagtaaatggtaaattcaagtttataaataagagtgtttcctttgtctcgaggttgttacttagggcatgtcagtgttgtggagtagtttaaagccacctgaatgaagttttctgaagttttccaaagaacaaataaacttcttctagattttccttgc

SEQ ID NO: 7999 - protein, 91 aa, Homo sapiens
MAASPGSGSANPRKFSEKIALHTQRQAEETRAFEQLMTDLTLSRVQFQKLQQLRLTQYHGGSLPNVSQLRSSASEFQVERNSSPCVDGLRQ

SEQ ID NO: 8000 - DNA, 2446 bp, Homo sapiens
tatgatcacagctatgcagttcttaccataaatgtaaacggaggctggaaaagagcatgaagaagggaaaacagctaatgtgttagggttgtggatagtagcttagtttttctttcagaaattcttttattgttgttaaagattatgccagtgtatccaaacatacacactcaaagaccttgcaagaggacgttactatcatggtatatgggacatttggaacatgggtaagctctttccgaaaatagagtaatcaaaacccagaaagcaccggaaaccttgagggtgtgatcacttacgtcgagaagaaattgaaacaagactttcattcttgaaccgttcccctacaaaatactatactttgatgcttctttagatctttgctgttacctctcagcgttcttaaatcactttgtttccaggttcaatttcagaagcttcagcaactgcgccttacacagtaccatggaggatccttaccaaatgtgagccagctgcggagcagtgcgtcagagtttcagccgtcatttcaccaagctgataatgttcggggaacccgccatcacgggctggtggagaggccatccaggaaccgcttccaccccctccaccgaaggtctggggacaagccagggcgacaaatatccttttttactcttcaaagggagtgtgcattctgaaatgtttgaaaagttttcaggatttatcttccctgcaattctcctttggcctcagaatcttcatttatctgatgaaaggaggcaatacaaataaatgagttggaaactagaaacatctctgcagtcaacatttggaaacatcattgtaggtgtttatgaaagcatcaataaagttcagtttaatgaaataacaacaaaaacaacctgtaattcggtcccattgcagggtgttctgagcattttctccagaaattggccacgttagagttaaacctgactttgaatcaggttagagagccttagtctctttagcaaaaatggacatagagatatgtgatttatttgtacttcttttgatctgctgacctgcttttggaacttacagacaaaatttcatattattttctatttgtgatgtttcaaactcagtaagtgataactaaaataaacctagaatataggaaaatctcatgcagtgatgtacagtcacaccaaactctgctgttaagtagaaataaaggaaaggaaatggtgaattcacctgacagtttcatttaatcagtcctgtttacagggcggcagtggtgggtgcagctgtgtgaccagcattgtgccgaaggctttggggaacagaactgagctggattttttgggagaggacacagaagtgtgccaggagggcccgtgctctcacttcattcttctcagtactcgggcgcaggggtggaggaaggagaagaaaggcggggtgggtctcgctgcggagagctgaattcctggcagtgatggtagagttggcttcacaagcctagaaaccaggaagtgggggcagggcactcatgtttactgagcacctacccatgccaggcgctgtgctgggtaatttatgtgtcacttagtcctcaaaaactcactgagtcgttaatttttttaaccctcattttctgatgaggaaactgagtgtgtggtgaagtaacccaggattcagaccaggccccgctgatggcccagcctgtgctctcccctccctatgccacctgcgaccattcgcagtgatgaggaccttgtacaagggagccaggagttgtgggggcactctagggaaaccccaacttttcttgccttcaagcttcttgcagtttttagtctatttggaggcaaggataatgaccccagggaatgtttttctctcccctttctcccgcccccaggaacacaccacatttggtccacagaaggactgacttctgattttgtatattatgtggctgttatcaaggaaagtaaagatgataaatgatcttgagaatctattctggaatgtgtgataactttgacattgaatgaaaaaggcaaaaggaaatggaggcaattcatcagcaaatttgtacatgtcaggatggagtggtacatcaaaccgttgtccaaattgccaagaatattcaggcaaaagacttggagtgtttctttgattgatttaacaatgtattttttttggctgggcatggtggctcacgcctgtaatcccagcactttgggaggccgaggtgggcagatcacgaggtcaggagattgagaccatcctggctaacgtggtgaaaccccgtctctactaaaattacaaaaaattagccaggctcggtggtgggcacctatagtcccaggctgaggcaggagaatggtgtgaacccgggaggtggagcttgcggtgaaccgagatcgcgccactgcactccagcctgggcaacagagcgagactccgtctc

SEQ ID NO: 8001 - protein, 89 aa, Homo sapiens [sequence omitted]

SEQ ID NO: 8002 - DNA, 654 bp, Homo sapiens
ctttgtttttggtgttttagagtcggtgaaggctttaaaggaagtaggcagctggaacccggctgtggcgggttgaaaagcccgggcgtttgagagctgagacttgccagttcccacaggccaagccaggcgtctgcaccccattctcttggttccgacgaatatgctctccatgagggtgttcttcagggcctaccacaatggctggcactagagaagggcacaaaattgaagaacagtgaagacaaaagcaataagatgattaaggccatgtgagacagcaacaatatcaggttcctgaacacacaacaacataaaagcagtaaagaagctgagggatagctcgctcacctggcaggatggtgttcgggagactcccgcagttggaatacgggcttggtctcaaatgaaaagagtcctgcagttctcgggaaccttgttgcaccagaggcacctggaagcatcgaaggtcatgtgaggaaggccacacctctgtttccaaggaggaagatgtcaccgatgcccacagcctgccacagctcggggctggtaggctcctctcgattcctgcacgtttctgcttctgacactgcttctacccggagagttgtgtatttaccaagagtcagttgtgtgattctcaaacatacttat

SEQ ID NO: 8003 - protein, 47 aa, Homo sapiens
MSPMPTACHSSGLVGSSRFLHVSASDTASTRRVVYLPRVSCVILKHT

SEQ ID NO: 8004 - DNA, 3007 bp, Homo sapiens
ccagcatgggcctgctggacccctctgttgaagagacgtttcgagctgacagactgtgaacagaaggcagtggaacagaagaatgtttttctgcaacagccaaaatagaatggaatagaatgaagccagctgataccacgggctttcgttatcttgacatagaaggaagcaatgccacggctccagggtttcagatgagatcccatctcagacactgtggcttcctccagatcacacagctttgtactgcctctcccgcctgtggccaaagtcgtgttgcagcaggcaggctgcttggagcttcccatgaactggaaagctcacctccactgcatctttttactggccatccagtcagccgatgtgtaagagtaggaaatactgtgtcactggaggcctccgtagcattgtgtagtgtgctcagaaccactgatctccgtccgcaccgaaggcgggcccggagtgggaggctcggcctggggcggcggcaccggagagggcacctcgatgcctgctctgacctgacccagagggcgaggccctccagcgggggacattcccaggctgagtggaccccacggctctctcccacgcctggattacgacatgaagtttttaccacaagcccgagggcaggcttgagttaggcagactgaaggctaattttcattttctcccagctggtttctgctgcttcagaaaagtacaccttttccttatggaccagaggaagaggaagaccattttatcagtcactgaaaagagtcccctggcactgatgagcctgaagagaactgtgctcctcctcgggggctggggaaggaagacagggactgcaggtgtctcatactcagtggcctccagacaaactccagacaagcacagacctccccactaagagcagccagagggagctggtgaggccctaaccccacccaccgagcaactgagcttccccatccctccccagagctgtgtctctgtgggctgggagtctaatgtcacccccctagaccgtaagctccttgagggcagggacagtgccttatcattgttgaacccgtagcactccacgcgggtgggtgggagctgtcttctgagtacatccggaagggctgagcaggtgagtgccctgagcatcctggctgggccccacccaggaagatcttccttctcagatccacgtttggctctaaattgcttcaagtagagattcattctttgaggttgaaaaaatagtttatagtaaaacgaaggcctaattcatggaagcatcattagtcatcaataccttctcataaaatagatgggccagatttccaccaccgcctgcctcctctaacttgggtgatgccagtaggtttgaagggggcagagcactgcagggggaggggggggtctaggctgtgagaggacagggtggagaggaggagaaccctgaaggagagacggaagatgccaggacctttgcttggacagccattgcccttccaggagaccctggagtgtactgagggttgctggactgttccacccagaggagcaaggctgtacaatgagggtctgaatctggcacacctgtcccttatgtaaaaggagtcgtggtcacaagaccctgggctggttagcctctcccgacctcattccatttctatcttctgaccttgcctctcatctttaaaataaccctcatggggtgcccctccaccttcctctggaatccaagtattcctgtttcacatttgccccaaatctttgctgtggaattgggaaatcaaaccagagtcctcctcgcctgatttccagctcaggaagggcctgctggcctgccctgttcccagttacactttcagatccctttgtgctcaagatctcagagggggtggctttttgttaaagagccttcagtcgcaatgctacccagcaccccatgtgccaaaagaaaccagctcctgtgtcaaagggcttccaaacctgatctcactctcaacaggcgatggtgctgatgtttcaagaattgtgtttttataaaacagaggtctcagcatagtcactcttcacatagtgccttacccatgggtatcgtcatatccgggtcccagttcagtttgtctgcacagcagccaccctgcctggcaacagagaccccaagacctacacagtgaaccctactgccccaaaggcgttctccaggtgacttgtgaaaacagacctccggggaagtgatttattgggggtgtacactgggggcaatatggtttagcactgaattcaatttgtccttaggtctatgagtgagtccgatcttttcttgtgaaaggttttgggcatcgtacaacccactctgcctagaaggtgtggaggactcaccacgggcagggtcgccctggcccacagcacgtgagcctgcactcactgcggcctttgtaacaaaaccagttgtggtcctcagcatttgaagcagctgcatacttcagagtaaactatttttcattatttagttttgtcacaagaaatcgaccattgtactactctcacttacagcagttaaacagcatagaactaaaaacctgtctgcatttccattttttctttctgtatggttgtgggttttaggacatagggggttaggagaaggggtttcttgatcatgtcatgaattctcctttgtcctgtttctcctgtttcatttctcctccgcctgctgtatattacctgagctggtgttgtatcttcaagtccatatgcgtatttgcagacctttcctgttcccactcttgttggctcttctgatttatgcacagatggttcccagcatgtgtccagtgcttcatggatgggaccatcccagcaactaatcagacttcctgccagtgtcctaacccccagggcaccctgttcaaccatatttaaaaattggaatttgtataaagttgcttccaagttttataatgcatcattttacatcttttgtaattaaaagcatcacaatgaggttgtctctgca

SEQ ID NO: 8005 - protein, 175 aa, Homo sapiens [sequence omitted]

SEQ ID NO: 8006 - DNA, 2534 bp, Homo sapiens
ggtcgctgggatattcagttaagggagcttcactttggagatatatcctgaatataaccccttgaccccagacaaatgatttagaccataaagaaatattcacgcagcccagaattgtgcttctaacaagagcacgaagagctgctttgtaggagaatcacttgaacccgggaggcagaggtttcagtgagctgagatggcgtcaccgcactcctgcctgggcgacagagcgagactccatctccaaaaaaaaaaaaagaaaaaagaaaaaaaaaaaaagacctactttgtgagagagtatagtgtcctccatgatgtcaacctcaatgaatcagataggtcccaagccatatctgtgggttaataatccatcatgaatcaattgccattaacttgccaagaactttttttcaatttcagtttgaagtttcactcttctgtgtgcttatttgtttgttggtttgttatgttttagccactgtaggcttctagagagaataaccattcctttcctggcccacgccctttccagtttgctttccagggtagagttactaattaaattccagacacttattaacaaacttttattactagacaggatcatgcacatggatgtaactccttttagctccatcttttcctcactccctctgattggttggtatgaccaaagggccattgtccagttccatatagggaagggatctgtggggtcttgctggctagctccctcacccttccaccttctcactctctccatgcattatgtatgcttcacatgggccttgctcatgtgaaacgaatgcccaggagttcaaggttgcagtgcaaggaggcccaagcattcttctctttgcaatctggtacttacagggttctaagtactccattaaaactgggtgtgtgggaggagaagaaacactgggcagctctcctacaaccagtatccctaggaaggaaatggaagaaaagaccctgtaatttggatgactatgtatggggacagctgaaatacataccacttaagttctccttcactgctgctgctgctgatcggcaatgtgtgaaagcagctgagccaggagagcccagcatgcacgcggctgccactgcaatggcaggtaccagggccggtactacatttgatgaattacaatgccaagaagacatggtttgtaccaggtttgaaaacaaggcctatgtgaataccaatgactttacgagacaataaggaaaaacaacgtagactgagttccccatctagtgacacccacagccctagcttcctccttaagcccctcagactgttttatctctgaactggttagtgaagacttaaaaacatagtcctgcaggttgactaagaaaaatctttaagaatggcaactggtgggtgttaccttcactcactgcaagatctgccgtatatatggtttaaaaagaattttaaaagttagttaaggtcaatcatggtggctcacacctataattttagagctttgggaggtcgagaagcaggaagattgcttgaggccaggagttcaatatcagcctgggcaatatagcaagacctcatctctacaaaattaaattagctggggtggtggcacacgtctgtagtcctagctactcaggaggctgaggcaggaggatcgcttgagcccagaagttcaagggtgcagtgagctatgattgcaccattgcactccagcctgggcaacagagtgagactctgtcaaaaaaaaaaaaaaaaaagttggtagggaaaagctaacaagagacttttgaaaatagaaaatagagtaaatagcattattcaagacacagaaagaaagcaggaaagcatatttgtgagaaataattattaaaggggctaggcacagtggctcacacctgtaatcccagcactttggtaggccaagatggctggatcacctgaggtcaggcgttcaataccagcctggccaacatggtgaaaccccgtctctactaaaaatacaaaaaattagccgagatggctggatcatctgaggtcaggagttcaataccagcctagccaacatggtgaaaccccgtctctactaaaaatacaaaaaattagcgcccaggctggtcttgaactcgtgagctcaagcgatctgctcacctcggcctcccaaagtgctgggattacaggtgtgagccaccttgcctggcacgttttgtctttctttctacttttttttttttttttacactttaagctctaggttacatgtgcacaacgtgcaggtttgttacatatgtatacatgtgtcatgttggtgtgctgcacccattaactcgtcatttacattaggtatatctcctaatgctatccctccccgatcccccaaccccatgacaggccccggtgtgtgatgttccccttcctgtgtccaagtgttctcattgttcaattcccatctatgagtgagaacatgcatttcattcttgatgatggtggtggtgatgatgttgatgacaattatattaataaagcaattgctatg

SEQ ID NO: 8007 - protein, 43 aa, Homo sapiens
MFPFLCPSVLIVQFPSMSENMHFILDDGGGDDVDDNYINKAIA

SEQ ID NO: 8008 - DNA, 8192 bp, Homo sapiens
atgggagctacagggcgcctcgagctcacactggccgcccctccccatccgggcccagcctttcagcgttcaaaagccagggagacccaaggagaggaggaagggagtgaaatgcagatcgccaaaagtgactccatacatcacatgagccactcccaggggcagccagagctgcctcctctgcctgcttctgctaatgaggaaccgtctggactctatcagactgtcatgtcacacagcttttacccgcccttgatgcaacgcacgtcatggaccttggctgcacccttcaaagaacagcatcaccaccgtggacccagtgattccatcgccaacaactactccttgatggcccaggacctgaagctgaaagatctgctgaaggtctaccaaccggccaccatcagtgtccctagggacaggaccggtcaggggctgccatcatcaggaaatagaagctcatcagagcccatgaggaaaaaaacgaagttttcctccagaaacaaagaggattccactaggatcaagttggccttcaagacgtcaatcttctcacccatgaagaaggaggtaaagacatctttgacgttcccaggaagcagaccaatgagtccagaacagcagctcgatgtcatgttacagcaggagatggaaatggaaagtaaagaaaagaagccatctgaatcggacctggagagatactattactatctgaccaatggaattcgcaaagacatgattgcccctgaggagggtgaagtgatggttcggatttcaaagctgatttctaacacgctgctgacgagtcccttcctggagcccctgatggtggtcctcgtgcaggagaaggagaatgactattactgtagcctcatgaaaagcatcgttgattacatcctcatggacccaatggagagaaaacggctctttattgagagcatcccccgcttgtttcctcaaagagtgatccgggcccctgtgccctggcacagtgtctacaggagcgccaagaagtggaacgaggagcatctgcacacggtgaaccccatgatgctcaggctgaaagaactgtggtttgcagaattcagagacctcaggtttgttcgaacagcagaaatactagcgggaaaattgcctctgcagcctcaggaattttgggatgtgatccagaaacactgcctggaggcacaccagactcttctcaacaagtggatccccacctgcgcccagctttttacctcacggaaggagcactggattcattttgctcccaagagcaactatgactcaagtcgaaacattgaggaatattttgcttctgtggcatcattcatgtcgctgcagcttagggagctggtcattaagtcacttgaggacctcgtttcccttttcatgatacacaaagatgggaatgattttaaggagccctaccaagagatgaagtttttcatacctcagctaatcatgatcaaacttgaagtcagtgaacccattattgtcttcaatccatcttttgatggctgctgggaattaatacgtgactctttcctggaaattattaagaactctaatgggatccccaagctgaaatacataccacttaagttctccttcactgctgctgctgctgatcggcaatgtgtgaaagcagctgagccaggagagcccagcatgcacgcggctgccactgcaatggcagagctgaaaggatataatctgctccttggaactgttaacgcagaagaaaaacttgtttctgattttttgattcaaactttcaaggtatttcagaaaaatcaagttggcccctgcaaatatttaaatgtctacaaaaagtatgttgacttattggataacacggcagagcaaaacatcgctgcgttcctgaaagaaaatcatgacattgatgattttgtgacgaagatcaatgccataaagaaacggagaaatgaaattgcatccatgaacatcaccgtgcctttagccatgttctgccttgatgctacggccctaaatcatgatctctgtgagcgagctcaaaatcttaaagaccatctgattcaattccaagtggatgtaaaccgagacaccaataccagcatttgtaatcagtacagccacatcgcagacaaagtcagtgaggttcctgccaacactaaggagctggtatccctcattgaattcctaaagaaatccagtgctgtcactgtgttcaaactcaggaggcaacttagagatgcaagtgaacggctggagttcctgatggactatgcagacttgccgtaccagattgaagatatctttgacaacagccggaacttgctccttcacaagagggatcaggcagaaatggatctgattaaaagatgctcagaatttgagttgagacttgagggctaccacagagaactggaaagttttaggaagcgcgaagtgatgactacagaagaaatgaagcacaatgttgaaaagcttaatgagctttcaaagaacctaaatcgggcgtttgcagagtttgagttgatcaataaggaggaagagctattggaaaaggagaagagtacttaccctcttctgcaggccatgctgaagaacaaagtaccttatgagcagctgtggtcgacagcctatgagttcagcatcaagtcagaggaatggatgaatggacccctcttcttactgaatgctgagcaaattgcggaggagatagggaatatgtggaggacaacgtataaactgatcaagaccttgtctgatgtgcctgcacccaggcgcttagcagagaatgtgaagatcaagatcgataagttcaagcagtacattcccatcctcagtatttcctgcaacccaggaatgaaagaccgacactggcagcagatcagtgagattgttggctatgagataaagcccaccgaaacgacctgcctctcaaatatgctcgaatttggattcggcaaattcgttgaaaaattggagcccattggtgcagctgccagcaaggaatactctctggagaaaaacttggatagaatgaagttggattgggttaacgtgacgttcagcttcgtgaaatacagggacactgatacaaacatcttgtgtgcaattgatgacattcaaatgctacttgatgatcacgtgataaagacccagaccatgtgtggctccccattcatcaaaccaatagaagcagaatgccggaaatgggaagaaaagctaattcgcatacaagacaatttggatgcctggttgaaatgccaagccacctggctgtacctggaaccaatcttcagttcagaggacatcatagcccagatgccagaagaggggaggaaatttggcattgttgatagttactggaaatcacttatgtcccaagcggtgaaagataacaggattctggtggcagccgaccagccacggatggcagagaagcttcaagaagccaactttctcttggaggacatccagaaagggctgaatgattacttggagaagaagagactattcttccccagattcttcttcctatcaaacgatgagctgctggaaatcttgtccgagacaaaggaccctctccgagtgcagccgcacttgaagaagtgctttgaaggaattgccaagcttgagtttacagacaatctggaaattgtgggcatgatcagctcggaaaaagaaactgttccattcatacagaaaatctacccagctaatgccaagggcatggtggaaaagtggctccagcaggtggagcagatgatgctggccagtatgcgagaagtcattggacttgggattgaagcatatgtcaaggtccctcgaaatcactgggtcttacagtggcctggacaggtggttatctgtgtctcctccatcttttggacccaggaggtgtcccaagccctggcggaaaataccttactggattttctgaaaaagagcaatgatcagattgcgcagattgtccagctggtgcgagggaagctgagcagtggagctcgactcactctcggggccctcacggtcatcgatgtccacgcccgcgacgtggtggccaagttatctgaggacagggtctccgatctgaatgatttccaatggatctcacagctgcgctactactgggtggccaaggatgtgcaggtgcagattatcaccacagaagccttgtatggctatgagtacctgggaaactccccccggctggtgatcacacccctcaccgaccgctgctacaggacactgatgggagctttgaagctgaaccttgggggtgctccagagggtccagctgggactggcaagacagaaaccaccaaagatttggccaaagccttggctaagcagtgtgtggtcttcaactgctccgatggtttggattacaaagctatggggaagttcttcaaggggctggcacaggctggagcatgggcgtgctttgatgagttcaacaggatcgaggtagaagtgctgtctgtggtcgctcagcagatcctcagcatccaacaagccatcattcggaagctaaagacattcatctttgaagggactgagctctctctgaacccaacctgcgctgtgttcatcaccatgaaccccgggtatgctggcagggctgaactgcccgacaatctcaaggccttgttccggacagtggccatgatggtcccagattacgccctcattggagaaatctccctctactccatggggtttctggactccagaagtctcgcccagaagatcgttgcgacctaccgcctgtgctcggaacaactgtcctctcagcatcactatgactacggtatgcgcgctgtcaagtctgtgcttactgccgcaggaaacctgaagctcaagtatccagaggagaatgaaagtgtcctgctgctccgggcattgcttgatgtcaatctggccaagttcttagcgcaagatgtccctctgtttcagggaattatatctgatttatttcctggagttgttcttccaaagccagactatgaagtttttctgaaagtgctgaatgataacatcaaaaagatgaaactccagccagtaccttggtttatagggaaaattatccagatctacgaaatgatgctggtgagacatggctatatgattgtaggagaccccatgggcggcaagacctctgcttataaagtgttggctgcagctctcggcgatttacacgcagccaatcagatggaggagtttgctgtggagtacaagatcatcaaccccaaggctatcacgatggggcagctgtatgggtgctttgaccaagtgagccacgagtggatggatggtgtccttgccaatgctttccgggagcaagcgtcttcactctctgatgatcgcaagtggattatatttgatgggccagtggatgctatttggattgaaaatatgaacactgttctggatgacaataaaaagctgtgtctcatgagtggggaaattatccagatgaactccaagatgagcctgatcttcgagcccgccgacctcgagcaagcctctccagccactgtgagcaggtgtgggatgatctacatggagccccatcaactaggctggaagcccctgaaggattcctacatggacaccctgccctccagtctcaccaaggagcacaaagaattggtcaatgacatgttcatgtggcttgtccagccctgcctggaatttggtcgccttcattgtaaatttgttgtccagacatctcccatccaccttgccttctcaatgatgagactgtactcttctctgcttgatgaaatcagggcagtagaagaggaggaaatggaattaggtgaaggcctgtcaagtcaacagatctttctctggctccaaggactgtttctcttttccttggtgtggaccgtggctggcaccatcaacgcagacagcagaaagaaatttgatgtgtttttccgcaacctgatcatgggcatggatgataaccacccaaggcccaaaagcgtcaaactcaccaaaaacaacatctttccagaaagaggaagcatctatgatttttattttatcaaacaagctagtggacattgggaaacgtggacacagtatatcaccaaagaggaggaaaaagttccagctggtgcaaaggtctcagaactcatcatccccacaatggagacagcccggcagtccttcttcttgaaaacctacttagaccatgagattccaatgctgttcgtgggtcccacaggcactggcaaatcagccatcaccaacaacttccttctccaccttcccaaaaatacgtacctacccaactgcatcaatttctctgccagaacctcagccaatcagacccaggatatcatcatgtccaagctggatcgacgacggaagggccttttcgggcctcccatagggaagaaagcagtggtgtttgtggatgacctcaacatgccagccaaagaggtgtatggggcccagccacccatcgagctcctgaggcagtggattgaccatggttactggtttgacaaaaaagacacaaccaggctggacatcgtggacatgctgctcgtgacagccatggggccccccgggggaggaaggaatgacattactggacgattcactcgccatctgaatatcatttccatcaatgcctttgaggatgacattttaaccaagattttcagttcgattgttgactggcacttcgggaaagggtttgatgtgatgtttttaaggtacggaaagatgctggtccaagctactaagacaatttatagagatgcagtggagaacttcttgccaactccctcgaagtcacattacgtctttaacctgcgggacttctcacgagtgattcaaggggtcctgctgtgccctcacacacacctgcaggatgtagaaaaatgtatccggctttggatccatgaggtttatcgggtcttctatgatcgtctgattgacaaggaggacagacaggtctttttcaacatggtgaaggaaaccacctccaattgcttcaagcagaccatagagaaggtgcttatccacttgtcacccactggaaagatagtcgatgataacattcgaagcctcttctttggagattatttcaagccagaaagtgaccaaaaaatctacgatgagatcactgacctgaaacagctgactgtggtcatggagcactatctggaagaattcaacaacatcagcaaggcccccatgtccctggtcatgttcaggtttgccattgagcacatctctaggatctgccgtgtcctgaagcaggacaaaggccacctgctcctggtgggcatagggggcagcgggcggcaaagtgccgccaaactgtccacattcatgaacgcatacgagctataccagattgagatcaccaagaactacgcaggcaatgactggcgagaagatcttaagaagatcatactgcaggtcggtgtggccaccaagagcaccgtgttcctcttcgccgacaaccagatcaaggatgaatcattcgtggaggacatcaacatgcttctgaacacaggtgacgtgcctaacatcttccctgctgacgagaaggctgacatcgtggagaagatgcagactgcagccaggacccaaggagagaaggttgaagtcactcctctttctatgtataacttctttattgagagggtaattaacaaaatctccttttcattagccatgagtccaataggggatgccttcaggaaccgcctgcggatgttcccttcgctgatcaattgctgtacgattgattggttccagtcctggcccacagatgccctagagttggtggctaacaaatttctagaggatgtggagcttgatgacaacattcgggtagaggtcgtgtccatgtgcaaatatttccaagagagcgtcaagaagctgtcactcgattattacaacaaacttcgaagacacaactatgttacccccacctcctaccttgaattgattctaaccttcaagacgctcctgaatagcaagaggcaagaggtggctatgatgaggaaccgctacctgacaggcttgcagaaactcgactttgcagcttctcaggtagcggttatgcaaagagaactgacagctcttcaacctcaactcatcctcacctccgaggaaactgccaagatgatggtgaaaattgaagcggagacgagagaagctgatggaaa

SEQ ID NO: 8009 - protein, 4000 aa, Homo sapiens
MGATGRLELTLAAPPHPGPAFQRSKARETQGEEEGSEMQIAKSDSIHHMSHSQGQPELPPLPASANEEPSGLYQTVMSHSFYPPLMQRTSWTLAAPFKEQHHHRGPSDSIANNYSLMAQDLKLKDLLKVYQPATISVPRDRTGQGLPSSGNRSSSEPMRKKTKFSSRNKEDSTRIKLAFKTSIFSPMKKEVKTSLTFPGSRPMSPEQQLDVMLQQEMEMESKEKKPSESDLERYYYYLTNGIRKDMIAPEEGEVMVRISKLISNTLLTSPFLEPLMVVLVQEKENDYYCSLMKSIVDYILMDPMERKRLFIESIPRLFPQRVIRAPVPWHSVYRSAKKWNEEHLHTVNPMMLRLKELWFAEFRDLRFVRTAEILAGKLPLQPQEFWDVIQKHCLEAHQTLLNKWIPTCAQLFTSRKEHWIHFAPKSNYDSSRNIEEYFASVASFMSLQLRELVIKSLEDLVSLFMIHKDGNDFKEPYQEMKFFIPQLIMIKLEVSEPIIVFNPSFDGCWELIRDSFLEIIKNSNGIPKLKYIPLKFSFTAAAADRQCVKAAEPGEPSMHAAATAMAELKGYNLLLGTVNAEEKLVSDFLIQTFKVFQKNQVGPCKYLNVYKKYVDLLDNTAEQNIAAFLKENHDIDDFVTKINAIKKRRNEIASMNITVPLAMFCLDATALNHDLCERAQNLKDHLIQFQVDVNRDTNTSICNQYSHIADKVSEVPANTKELVSLIEFLKKSSAVTVFKLRRQLRDASERLEFLMDYADLPYQIEDIFDNSRNLLLHKRDQAEMDLIKRCSEFELRLEGYHRELESFRKREVMTTEEMKHNVEKLNELSKNLNRAFAEFELINKEEELLEKEKSTYPLLQAMLKNKVPYEQLWSTAYEFSIKSEEWMNGPLFLLNAEQIAEEIGNMWRTTYKLIKTLSDVPAPRRLAENVKIKIDKFKQYIPILSISCNPGMKDRHWQQISEIVGYEIKPTETTCLSNMLEFGFGKFVEKLEPIGAAASKEYSLEKNLDRMKLDWVNVTFSFVKYRDTDTNILCAIDDIQMLLDDHVIKTQTMCGSPFIKPIEAECRKWEEKLIRIQDNLDAWLKCQATWLYLEPIFSSEDIIAQMPEEGRKFGIVDSYWKSLMSQAVKDNRILVAADQPRMAEKLQEANFLLEDIQKGLNDYLEKKRLFFPRFFFLSNDELLEILSETKDPLRVQPHLKKCFEGIAKLEFTDNLEIVGMISSEKETVPFIQKIYPANAKGMVEKWLQQVEQMMLASMREVIGLGIEAYVKVPRNHWVLQWPGQVVICVSSIFWTQEVSQALAENTLLDFLKKSNDQIAQIVQLVRGKLSSGARLTLGALTVIDVHARDVVAKLSEDRVSDLNDFQWISQLRYYWVAKDVQVQIITTEALYGYEYLGNSPRLVITPLTDRCYRTLMGALKLNLGGAPEGPAGTGKTETTKDLAKALAKQCVVFNCSDGLDYKAMGKFFKGLAQAGAWACFDEFNRIEVEVLSVVAQQILSIQQAIIRKLKTFIFEGTELSLNPTCAVFITMNPGYAGRAELPDNLKALFRTVAMMVPDYALIGEISLYSMGFLDSRSLAQKIVATYRLCSEQLSSQHHYDYGMRAVKSVLTAAGNLKLKYPEENESVLLLRALLDVNLAKFLAQDVPLFQGIISDLFPGVVLPKPDYEVFLKVLNDNIKKMKLQPVPWFIGKIIQIYEMMLVRHGYMIVGDPMGGKTSAYKVLAAALGDLHAANQMEEFAVEYKIINPKAITMGQLYGCFDQVSHEWMDGVLANAFREQASSLSDDRKWIIFDGPVDAIWIENMNTVLDDNKKLCLMSGEIIQMNSKMSLIFEPADLEQASPATVSRCGMIYMEPHQLGWKPLKDSYMDTLPSSLTKEHKELVNDMFMWLVQPCLEFGRLHCKFVVQTSPIHLAFSMMRLYSSLLDEIRAVEEEEMELGEGLSSQQIFLWLQGLFLFSLVWTVAGTINADSRKKFDVFFRNLIMGMDDNHPRPKSVKLTKNNIFPERGSIYDFYFIKQASGHWETWTQYITKEEEKVPAGAKVSELIIPTMETARQSFFLKTYLDHEIPMLFVGPTGTGKSAITNNFLLHLPKNTYLPNCINFSARTSANQTQDIIMSKLDRRRKGLFGPPIGKKAVVFVDDLNMPAKEVYGAQPPIELLRQWIDHGYWFDKKDTTRLDIVDMLLVTAMGPPGGGRNDITGRFTRHLNIISINAFEDDILTKIFSSIVDWHFGKGFDVMFLRYGKMLVQATKTIYRDAVENFLPTPSKSHYVFNLRDFSRVIQGVLLCPHTHLQDVEKCIRLWIHEVYRVFYDRLIDKEDRQVFFNMVKETTSNCFKQTIEKVLIHLSPTGKIVDDNIRSLFFGDYFKPESDQKIYDEITDLKQLTVVMEHYLEEFNNISKAPMSLVMFRFAIEHISRICRVLKQDKGHLLLVGIGGSGRQSAAKLSTFMNAYELYQIEITKNYAGNDWREDLKKIILQVGVATKSTVFLFADNQIKDESFVEDINMLLNTGDVPNIFPADEKADIVEKMQTAARTQGEKVEVTPLSMYNFFIERVINKISFSLAMSPIGDAFRNRLRMFPSLINCCTIDWFQSWPTDALELVANKFLEDVELDDNIRVEVVSMCKYFQESVKKLSLDYYNKLRRHNYVTPTSYLELILTFKTLLNSKRQEVAMMRNRYLTGLQKLDFAASQVAVMQRELTALQPQLILTSEETAKMMVKIEAETREADGKKLLVQADEKEANVAAAIAQGIKNECEGDLAEAMPALEAALAALDTLNPADISLVKSMQNPPGPVKLVMESICIMKGMKPERKPDPSGSGKMIEDYWGVSKKILGDLKFLESLKTYDKDNIPPLTMKRIRERFINHPEFQPAVIKNVSSACEGLCKWVRAMEVYDRVAKVVAPKRERLREAEGKLAAQMQKLNQKRAELKLVVDRLQALNDDFEEMNTKKKDLEENIEICSQKLVRAEKLISGLGGEKDRWTEAARQLGIRYTNLTGDVLLSSGTVAYLGAFTVDYRVQCQNQWLAECKDKVIPGFSDFSLSHTLGDPIKIRAWQIAGLPVDSFSIDNGIIVSNSRRWALMIDPHGQANKWIKNMEKANKLAVIKFSDSNYMRMLENALQLGTPVLIENIGEELDASIEPILLKATFKQQGVEYMRLGENIIEYSRDFKLYITTRLRNPHYLPEVAVKVCLLNFMITPLGLQDQLLGIVAAKEKPELEEKKNQLIVESAKNKKHLKEIEDKILEVLSMSKGNILEDETAIKVLSSSKVLSEEISEKQKVASMTETQIDETRMGYKPVAVHSATIFFCISDLANIEPMYQYSLTWFINLYMHSLTHSTKSEELNLRIKYIIDHFTLSIYNNVCRSLFEKDKLLFSLLLTIGIMKQKKEITEEVWYFLLTGGIALDNPYPNPAPQWLSEKAWAEIVRASALPKLHGLMEHLEQNLGEWKLIYDSAWPHEEQLPGSWKFSQGLEKMVILRCLRPDKMVPAVREFIAEHMGKLYIEAPTFDLQGSYNDSSCCAPLIFVLSPSADPMAGLLKFADDLGMGGTRTQTISLGQGQGPIAAKMINNAIKDGTWVVLQNCHLAASWMPTLEKICEEVIVPESTNARFRLWLTSYPSEKFPVSILQNGIKMTNEPPKGLRANLLRSYLNDPISDPVFFQSCAKAVMWQKMLFGLCFFHAVVQERRNFGPLGWNIPYEFNESDLRISMWQIQMFLNDYKEVPFDALTYLTGECNYGGRVTDDKDRRLLLSLLSMFYCKEIEEDYYSLAPGDTYYIPPHGSYQSYIDYLRNLPITAHPEVFGLHENADITKDNQETNQLFEGVLLTLPRQSGGSGKSPQEVVEELAQDILSKLPRDFDLEEVMKLYPVVYEESMNTVLRQELIRFNRLTKVVRRSLINLGRAIKGQVLMSSELEEVFNSMLVGKVPAMWAAKSYPSLKPLGGYVADLLARLTFFQEWIDKGPPVVFWISGFYFTQSFLTGVSQNYARKYTIPIDHIGFEFEV

SEQ ID NO: 8010 - DNA, 3742 bp, Homo sapiens
agagtcaaaaccatctccaagctgggtgcaatgtctcatgccagtaatcccagctactcaggaggctgaggagagaggattgcttgagcccaggagttcaagtctagcctgggcaatatggcaagacctcatctcttaagaaaagcaaaactccaccttccatgccccagatgaaaagtgataaaagagagtgggcctttgtgaagaccgcaagacataactggtattcacgtagattcttcttcctatcaaacgatgagctgctggaaatcttgtccgagacaaaggaccctctccgagtgcagccgcacttgaagaagtgctttgaaggaattgccaagcttgagtttacagacaatctggaaattgtgggcatgatcagctcggaaaaagaaactgttccattcatacagaaaatctacccagctaatgccaagggcatggtggaaaagtggctccagcaggtggagcagatgatgctggccagtatgcgagaagtcattggacttgggattgaagcatatgtcaaggtccctcgaaatcactgggtcttacagtggcctggacaggtggttatctgtgtctcctccatcttttggacccaggaggtgtcccaagccctggcggaaaataccttactggattttctgaaaaagagcaatgatcagattgcgcagattgtccagctggtgcgagggaagctgagcagtggagctcgactcactctcggggccctcacggtcatcgatgtccacgcccgcgacgtggtggccaagttatctgaggacagggtctccgatctgaatgatttccaatggatctcacagctgcgctactactgggtggccaaggatgtgcaggtgcagattatcaccacagaagccttgtatggctatgagtacctgggaaactccccccggctggtgatcacacccctcaccgaccgctgctacaggacactgatgggagctttgaagctgaaccttgggggtgctccagagggtccagctgggactggcaagacagaaaccaccaaagatttggccaaagccttggctaagcagtgtgtggtcttcaactgctccgatggtttggattacaaagctatggggaagttcttcaaggggctggcacaggctggagcatgggcgtgctttgatgagttcaacaggatcgaggtagaagtgctgtctgtggtcgctcagcagatcctcagcatccaacaagccatcattcggaagctaaagacattcatctttgaagggactgagctctctctgaacccaacctgcgctgtgttcatcaccatgaaccccgggtatgctggcagggctgaactgcccgacaatctcaaggccttgttccggacagtggccatgatggtcccagattacgccctcattggagaaatctccctctactccatggggtttctggactccagaagtctcgcccagaagatcgttgcgacctaccgcctgtgctcggaacaactgtcctctcagcatcactatgactacggtatgcgcgctgtcaagtctgtgcttactgccgcaggaaacctgaagctcaagtatccagaggagaatgaaagtgtcctgctgctccgggcattgcttgatgtcaatctggccaagttcttagcgcaagatgtccctctgtttcagggaattatatctgatttatttcctggagttgttcttccaaagccagactatgaagtttttctgaaagtgctgaatgataacatcaaaaagatgaaactccagccagtaccttggtttatagggaaaattatccagatctacgaaatgatgctggtgagacatggctatatgattgtaggagaccccatgggcggcaagacctctgcttataaagtgttggctgcagctctcggcgatttacacgcagccaatcagatggaggagtttgctgtggagtacaagatcatcaaccccaaggctatcacgatggggcagctgtatgggtgctttgaccaagtgagccacgagtggatggatggtgtccttgccaatgctttccgggagcaagcgtcttcactctctgatgatcgcaagtggattatatttgatgggccagtggatgctatttggattgaaaatatgaacactgttctggatgacaataaaaagctgtgtctcatgagtggggaaattatccagatgaactccaagatgagcctgatcttcgagcccgccgacctcgagcaagcctctccagccactgtgagcaggtgtgggatgatctacatggagccccatcaactaggctggaagcccctgaaggattcctacatggacaccctgccctccagtctcaccaaggagcacaaagaattggtcaatgacatgttcatgtggcttgtccagccctgcctggaatttggtcgccttcattgtaaatttgttgtccagacatctcccatccaccttgccttctcaatgatgagactgtactcttctctgcttgatgaaatcagggcagtagaagaggaggaaatggaattaggtgaaggcctgtcaagtcaacagatctttctctggctccaaggactgtttctcttttccttggtgtggaccgtggctggcaccatcaacgcagacagcagaaagaaatttgatgtgtttttccgcaacctgatcatgggcatggatgataaccacccaaggcccaaaagcgtcaaactcaccaaaaacaacatctttccagaaagaggaagcatctatgatttttattttatcaaacaagctagtggacattgggaaacgtggacacagtatatcaccaaagaggaggaaaaagttccagctggtgcaaaggtctcagaactcatcatccccacaatggagacagcccggcagtccttcttcttgaaaacctacttagaccatgagattccaatgctgttcgtgggtcccacaggcactggcaaatcagccatcaccaacaacttccttctccaccttcccaaaaatacgtacctacccaactgcatcaatttctctgccagaacctcagccaatcagacccaggatatcatcatgtccaagctggatcgacgacggaagggccttttcgggcctcccatagggaagaaagcagtggtgtttgtggatgacctcaacatgccagccaaagaggtgtatggggcccagccacccatcgagctcctgaggcagtggattgaccatggttactggtttgacaaaaaagacacaaccaggctggacatcgtggacatgctgctcgtgacagccatggggccccccgggggaggaaggaatgacattactggtatgtgaagggaagagctcattcctctttccctccatccccagcagagctgggccacctttatgaaaggtgggttggtgtgccacagtctgtcctgccaaaccacgtggcaggagcatggagcagaagcatgtgtaggctacaggcttcatgttggaaattgtgtgaaatagaaggggacgatggcaagaagatgtgaggagtgtttggctaggccctagagaaacagagagtctcataggaaaaggagagttcagtgtggccagcatgtgttccgggagggaggctccatccagaagcctcaactaggggtgcatgacagtcatccattgtattcgttataattctttaggttgccagagacagaatgcctaacccaaagtgccctaagcaaaattaataacaataaaaatagcaaataaat

SEQ ID NO: 8011 - protein, 1054 aa, Homo sapiens
MPQMKSDKREWAFVKTARHNWYSRRFFFLSNDELLEILSETKDPLRVQPHLKKCFEGIAKLEFTDNLEIVGMISSEKETVPFIQKIYPANAKGMVEKWLQQVEQMMLASMREVIGLGIEAYVKVPRNHWVLQWPGQVVICVSSIFWTQEVSQALAENTLLDFLKKSNDQIAQIVQLVRGKLSSGARLTLGALTVIDVHARDVVAKLSEDRVSDLNDFQWISQLRYYWVAKDVQVQIITTEALYGYEYLGNSPRLVITPLTDRCYRTLMGALKLNLGGAPEGPAGTGKTETTKDLAKALAKQCVVFNCSDGLDYKAMGKFFKGLAQAGAWACFDEFNRIEVEVLSVVAQQILSIQQAIIRKLKTFIFEGTELSLNPTCAVFITMNPGYAGRAELPDNLKALFRTVAMMVPDYALIGEISLYSMGFLDSRSLAQKIVATYRLCSEQLSSQHHYDYGMRAVKSVLTAAGNLKLKYPEENESVLLLRALLDVNLAKFLAQDVPLFQGIISDLFPGVVLPKPDYEVFLKVLNDNIKKMKLQPVPWFIGKIIQIYEMMLVRHGYMIVGDPMGGKTSAYKVLAAALGDLHAANQMEEFAVEYKIINPKAITMGQLYGCFDQVSHEWMDGVLANAFREQASSLSDDRKWIIFDGPVDAIWIENMNTVLDDNKKLCLMSGEIIQMNSKMSLIFEPADLEQASPATVSRCGMIYMEPHQLGWKPLKDSYMDTLPSSLTKEHKELVNDMFMWLVQPCLEFGRLHCKFVVQTSPIHLAFSMMRLYSSLLDEIRAVEEEEMELGEGLSSQQIFLWLQGLFLFSLVWTVAGTINADSRKKFDVFFRNLIMGMDDNHPRPKSVKLTKNNIFPERGSIYDFYFIKQASGHWETWTQYITKEEEKVPAGAKVSELIIPTMETARQSFFLKTYLDHEIPMLFVGPTGTGKSAITNNFLLHLPKNTYLPNCINFSARTSANQTQDIIMSKLDRRRKGLFGPPIGKKAVVFVDDLNMPAKEVYGAQPPIELLRQWIDHGYWFDKKDTTRLDIVDMLLVTAMGPPGGGRNDITGM

SEQ ID NO: 8012 - DNA, 2855 bp, Homo sapiens
atgaactccgttagtggcaatgcccccgaagaggcgcaggtgtgtgcacctgtgattaagggtgtcgaggaggggcagcctcatctcttgaagcagaaagtgttgtcacctggtgatgggacagagggaaaagctctggggctgggaaacctgggggcttgtgtcaaagctccacccatcaggagcttcaagagaagatggggggcggggggcggtggctggaaagatggaagttgggatgggaaagcggttgtagaaaaggattcactcctggaccgaaggcaggaggatatcccgggcgagagaagggagggtcggggatgggctgagttggagtcccagaggaaaagcggaagcgagagcttcgtcacccgctgtcttccagctcccgagcagccagccgcccccgggaccgacggctgggggctgccgagcggcggcggaggcgcccaggacgcctggctccggaccccgctggcccccagcgagatgatcacggctcagagcgcgctgccggagagggaagcgcaggagtccagcaccaccgacgaggatctcgcaggccggagagcggccaacgggagcagcgagaggggcggcgccgtcagcacccccgactatggggagaagaagctgccacaggcgctcatcatcggggtcaagaaaggagggacccgcgcgctgctggaggcgatccgcgtgcacccggacgtgcgggcggtgggcgtagagccgcacttcttcgacaggaactacgaaaaggggttggagtggtacagaaatgtgatgcccaagactttggatgggcaaataaccatggagaagactccaagttactttgtgacaaatgaggctcccaagcgcattcactccatggccaaggacatcaaactgattgtggtggtgagaaaccccgtgaccagggccatctctgactacacgcagacactgtcaaagaaacccgagatccccacctttgaggtgctggccttcaaaaaccggaccctcgggctgatcgatgcttcctggagtgccattcgaatagggatctatgcgctgcatctggaaaactggctccagtatttccccctctcccagatcctctttgtcagtggtgagcgactcattgtggaccccgccggggaaatggccaaagtacaggattttctaggcctcaaacgtgttgtgactgagaagcatttctatttcaacaaaaccaaggggttcccttgcctaaagaagccagaagacagcagtgccccgaggtgcttaggcaagagcaaaggtcggactcatcctcgcattgacccagatgtcatccacagactgaggaaattctacaaacccttcaacttgatgttttaccaaatgactggtcaagattttcagtgggaacaggaagagggtgataaatgaggctagagaggcagaggaaggctagtcaataagctaaggaggctccttgcctgagtccttgaataccccagcttctgcagcttcacttgctggagtgccaagtagatctcctcctccttcatgcagccaggattgcctccagtgctgttagcttaggcaaacaggtggatcccatggcatccccatggaggaaccaggcccatctgggcagcagcatctggttgaccagatggccaccagaacccactgttcattcttatcttctgctagttaatatagcctgaagacagaggataaatagttgtcaatgtcagagacagtgctattaatgtatatgtgagcgacaaaaaaggtctgctttataggggttctcactctagcttggggagccagggttctagccctgtatctgtcatgggcacctgctgtctaaacctctgcttgggcttctccccagaatgcactttgtggctgagtgctccaggactcctagggagcaaggtcctccctctaaggtgtttctagtcttctctttaaaggtctcatcccacaacccctgacttcctccctccccacatcatgaaggcagaggcatgcacattcctcactgaaaaagaaaacacacacccacccacacacacacacacagaagaaaatgaaagctgacacacctcgaagccttctttccaagagccctctaaatggggttgggtctcactcttcatgagtatcctgggttgtgcagaagcttagcatatgcccttgtgttcggatcaggcccacagggctgctcaaagagtagagtaattgtaaccgaggtcagagctctggggttggcagagatgagtggccatatctgggggtaaaagaagaaatcctgtcctcttggtgggaggttaccttacctgaagaccatctctcccaagcactgtagttctgagcatgtttttggggtggactctgtcccctagggtccctagaagggcaaagaccagagagttgacaagtctgttattaggaataatccttagccatgtaatggagaaaggagcagtcagcattcttccaatttgccccaccaccacctcctcgggcttcattttctctatttagagatggcagagagtgaggtagtggcgagaaagctgactccattcatcagatccagtttatgagggttgggggtgagcaagggctgtctgcagaaacccccatcaagagctgctgaatgaagtgtcccttcccatcagtttgattcaattaaaatgcatcatttgacataaagcacttgttcacagatctccaaaaccaggaattgttctagtaaaactggaaatttgtatgagtggggggagttaaatctgttcagctgttattaaactgtcatttctcccgctaaatgaaaaccgtgttgttataaagcttaatgcaacctgatt

SEQ ID NO: 8013 - protein, 471 aa, Homo sapiens
MNSVSGNAPEEAQVCAPVIKGVEEGQPHLLKQKVLSPGDGTEGKALGLGNLGACVKAPPIRSFKRRWGAGGGGWKDGSWDGKAVVEKDSLLDRRQEDIPGERREGRGWAELESQRKSGSESFVTRCLPAPEQPAAPGTDGWGLPSGGGGAQDAWLRTPLAPSEMITAQSALPEREAQESSTTDEDLAGRRAANGSSERGGAVSTPDYGEKKLPQALIIGVKKGGTRALLEAIRVHPDVRAVGVEPHFFDRNYEKGLEWYRNVMPKTLDGQITMEKTPSYFVTNEAPKRIHSMAKDIKLIVVVRNPVTRAISDYTQTLSKKPEIPTFEVLAFKNRTLGLIDASWSAIRIGIYALHLENWLQYFPLSQILFVSGERLIVDPAGEMAKVQDFLGLKRVVTEKHFYFNKTKGFPCLKKPEDSSAPRCLGKSKGRTHPRIDPDVIHRLRKFYKPFNLMFYQMTGQDFQWEQEEGDK

SEQ ID NO: 8014 - DNA, 3203 bp, Homo sapiens
cagcgcgcggcggcggcggcagaggctgaagcagaagccgcggcggagccggggaagcgggggcgctgcagacggagcaggtgccgccggcgggtccgcgcgcccccctcggtccccttgcctgaggctgaggggggggcggtggtgggggggccacccggactcggcgggcagcgtggggcggggggccatgcggccgggctcccccctggcgcagcgggacagcggccagggccgggggcgcagcggcgtcgcttcatgcagccggggcggctgggcagcggcggcggcggcggcggcggcggcggcggcgggggcggcggctgaaaccatgtccgggcagcgccgggggctgccgccgccgccgccgccgccgcgagccgggagccgcgatggcccggtggcccgcacctcctccgcctccgcctccgcctccacctctggccgcgccgccgccgcccggcgcctctgctaaggggccgccggcgcgcaagctgctttttatgtgcaccttgtccctgtctgtcacctacctgtgctacagcctcctgggcggctcgggctccctgcaattccctctggcgctgcaggagtcgccgggcgccgccgccgagcccccgccgagcccgccgccaccctctctgctgcctacccccgtgcgcctcggcgccccctcgcagccgcccgcgccgccgccgctggacaacgcgagccacggggagccgcccgagcccccagagcagccagccgcccccgggaccgacggctgggggctgccgagcggcggcggaggcgcccaggacgcctggctccggaccccgctggcccccagcgagatgatcacggctcagagcgcgctgccggagagggaagcgcaggagtccagcaccaccgacgaggatctcgcaggccggagagcggccaacgggagcagcgagaggggcggcgccgtcagcacccccgactatggggagaagaagctgccacaggcgctcatcatcggggtcaagaaaggagggacccgcgcgctgctggaggcgatccgcgtgcacccggacgtgcgggcggtgggcgtagagccgcacttcttcgacaggaactacgaaaaggggttggagtggtacagaaatgtgatgcccaagactttggatgggcaaataaccatggagaagactccaagttactttgtgacaaatgaggctcccaagcgcattcactccatggccaaggacatcaaactgattgtggtggtgagaaaccccgtgaccagggccatctctgactacacgcagacactgtcaaagaaacccgagatccccacctttgaggtgctggccttcaaaaaccggaccctcgggctgatcgatgcttcctggagtgccattcgaatagggatctatgcgctgcatctggaaaactggctccagtatttccccctctcccagatcctctttgtcagtggtgagcgactcattgtggaccccgccggggaaatggccaaagtacaggattttctaggcctcaaacgtgttgtgactgagaagcatttctatttcaacaaaaccaaggggttcccttgcctaaagaagccagaagacagcagtgccccgaggtgcttaggcaagagcaaaggtcggactcatcctcgcattgacccagatgtcatccacagactgaggaaattctacaaacccttcaacttgatgttttaccaaatgactggtcaagattttcagtgggaacaggaagagggtgataaatgaggctagagaggcagaggaaggctagtcaataagctaaggaggctccttgcctgagtccttgaataccccagcttctgcagcttcacttgctggagtgccaagtagatctcctcctccttcatgcagccaggattgcctccagtgctgttagcttaggcaaacaggtggatcccatggcatccccatggaggaaccaggcccatctgggcagcagcatctggttgaccagatggccaccagaacccactgttcattcttatcttctgctagttaatatagcctgaagacagaggataaatagttgtcaatgtcagagacagtgctattaatgtatatgtgagcgacaaaaaaggtctgctttataggggttctcactctagcttggggagccagggttctagccctgtatctgtcatgggcacctgctgtctaaacctctgcttgggcttctccccagaatgcactttgtggctgagtgctccaggactcctagggagcaaggtcctccctctaaggtgtttctagtcttctctttaaaggtctcatcccacaacccctgacttcctccctccccacatcatgaaggcagaggcatgcacattcctcactgaaaaagaaaacacacacccacccacacacacacacacagaagaaaatgaaagctgacacacctcgaagccttctttccaagagccctctaaatggggttgggtctcactcttcatgagtatcctgggttgtgcagaagcttagcatatgcccttgtgttcggatcaggcccacagggctgctcaaagagtagagtaattgtaaccgaggtcagagctctggggttggcagagatgagtggccatatctgggggtaaaagaagaaatcctgtcctcttggtgggaggttaccttacctgaagaccatctctcccaagcactgtagttctgagcatgtttttggggtggactctgtcccctagggtccctagaagggcaaagaccagagagttgacaagtctgttattaggaataatccttagccatgtaatggagaaaggagcagtcagcattcttccaatttgccccaccaccacctcctcgggcttcattttctctatttagagatggcagagagtgaggtagtggcgagaaagctgactccattcatcagatccagtttatgagggttgggggtgagcaagggctgtctgcagaaacccccatcaagagctgctgaatgaagtgtcccttcccatcagtttgattcaattaaaatgcatcatttgacataaagcacttgttcacagatctccaaaaccaggaattgttctagtaaaactggaaatttgtatgagtggggggagttaaatctgttcagctgttattaaactgtcatttctcccgctaaatgaaaaccgtgttgttataaagcttaatgcaacctgatta

SEQ ID NO: 8015 - protein, 456 aa, Homo sapiens
MARWPAPPPPPPPPPPLAAPPPPGASAKGPPARKLLFMCTLSLSVTYLCYSLLGGSGSLQFPLALQESPGAAAEPPPSPPPPSLLPTPVRLGAPSQPPAPPPLDNASHGEPPEPPEQPAAPGTDGWGLPSGGGGAQDAWLRTPLAPSEMITAQSALPEREAQESSTTDEDLAGRRAANGSSERGGAVSTPDYGEKKLPQALIIGVKKGGTRALLEAIRVHPDVRAVGVEPHFFDRNYEKGLEWYRNVMPKTLDGQITMEKTPSYFVTNEAPKRIHSMAKDIKLIVVVRNPVTRAISDYTQTLSKKPEIPTFEVLAFKNRTLGLIDASWSAIRIGIYALHLENWLQYFPLSQILFVSGERLIVDPAGEMAKVQDFLGLKRVVTEKHFYFNKTKGFPCLKKPEDSSAPRCLGKSKGRTHPRIDPDVIHRLRKFYKPFNLMFYQMTGQDFQWEQEEGDK

SEQ ID NO: 8016 - DNA, 2252 bp, Homo sapiens
gctggatctgcattaaatgtcgaaaggaaggcggagaggggtgagacaagaggtgggaggtgaggcaggtgggagcctgaccctggagaaccccgcaggtggtgcttctgactttcagtttcagctttgacaccagcatggagctgactgtttgtcctttgctctggtatttagagaaatgtgatgcccaagactttggatgggcaaataaccatggagaagactccaagttactttgtgacaaatgaggctcccaagcgcattcactccatggccaaggacatcaaactgattgtggtggtgagaaaccccgtgaccagggccatctctgactacacgcagacactgtcaaagaaacccgagatccccacctttgaggtgctggccttcaaaaaccggaccctcgggctgatcgatgcttcctggagtgccattcgaatagggatctatgcgctgcatctggaaaactggctccagtatttccccctctcccagatcctctttgtcagtggtgagcgactcattgtggaccccgccggggaaatggccaaagtacaggattttctaggcctcaaacgtgttgtgactgagaagcatttctatttcaacaaaaccaaggggttcccttgcctaaagaagccagaagacagcagtgccccgaggtgcttaggcaagagcaaaggtcggactcatcctcgcattgacccagatgtcatccacagactgaggaaattctacaaacccttcaacttgatgttttaccaaatgactggtcaagattttcagtgggaacaggaagagggtgataaatgaggctagagaggcagaggaaggctagtcaataagctaaggaggctccttgcctgagtccttgaataccccagcttctgcagcttcacttgctggagtgccaagtagatctcctcctccttcatgcagccaggattgcctccagtgctgttagcttaggcaaacaggtggatcccatggcatccccatggaggaaccaggcccatctgggcagcagcatctggttgaccagatggccaccagaacccactgttcattcttatcttctgctagttaatatagcctgaagacagaggataaatagttgtcaatgtcagagacagtgctattaatgtatatgtgagcgacaaaaaaggtctgctttataggggttctcactctagcttggggagccagggttctagccctgtatctgtcatgggcacctgctgtctaaacctctgcttgggcttctccccagaatgcactttgtggctgagtgctccaggactcctagggagcaaggtcctccctctaaggtgtttctagtcttctctttaaaggtctcatcccacaacccctgacttcctccctccccacatcatgaaggcagaggcatgcacattcctcactgaaaaagaaaacacacacccacccacacacacacacacagaagaaaatgaaagctgacacacctcgaagccttctttccaagagccctctaaatggggttgggtctcactcttcatgagtatcctgggttgtgcagaagcttagcatatgcccttgtgttcggatcaggcccacagggctgctcaaagagtagagtaattgtaaccgaggtcagagctctggggttggcagagatgagtggccatatctgggggtaaaagaagaaatcctgtcctcttggtgggaggttaccttacctgaagaccatctctcccaagcactgtagttctgagcatgtttttggggtggactctgtcccctagggtccctagaagggcaaagaccagagagttgacaagtctgttattaggaataatccttagccatgtaatggagaaaggagcagtcagcattcttccaatttgccccaccaccacctcctcgggcttcattttctctatttagagatggcagagagtgaggtagtggcgagaaagctgactccattcatcagatccagtttatgagggttgggggtgagcaagggctgtctgcagaaacccccatcaagagctgctgaatgaagtgtcccttcccatcagtttgattcaattaaaatgcatcatttgacataaagcacttgttcacagatctccaaaaccaggaattgttctagtaaaactggaaatttgtatgagtggggggagttaaatctgttcagctgttattaaactgtcatttctcccgctaaatgaaaaccgtgttgttataaagcttaatgcaacctgatt

SEQ ID NO: 8017 - protein, 36 aa, Homo sapiens
MELTVCPLLWYLEKCDAQDFGWANNHGEDSKLLCDK

SEQ ID NO: 8018 - DNA, 1148 bp, Homo sapiens
ccggagcagtgtgaagaagaggcgagaacgacccccagaccgaccaaagcccgcgcgccactgcatcccgcgtccagcacctacgtcctgctgccgtcgccgccaccaccatgcccaagagaaaggctgaaggggatgctaagggagataaagccaaggtgaaggacgaaccacagagaagatccgcgaggttgtctgctaaacctgctcctccaaagccagagcccaagactaaaaaggcccctgcaaagaagggagagaaggtacccaaagggaaaaagggaaaagctgatgctggcaaggaggggaataaccctgcagaaaatggagatgccaaaacagaccaggcacagaaagctgaaggtgctggagatgccaagtgaagtgtgtgcatttttgataactgtgtacttctggtgactgtacagtttggaatactattttttatcaagttttataaaaatgtggaattttgttttacttttttttttttttaaagctatgttgttagcacacagaacacttcattgttgtttttgggggaaggggcatatgtcactaatagaatgtctccaaagctggattgatgtggagaaaacacctttcccttctagttttgagagacttcctcttggctcccaggaggagggattccctgactttgacacacatggccaccttggatagacttaactcccttaagcccagacatctgttgggacctgacccctagtcattggttaccagtgtgtcaggcaatctggactttccagtgatgccactgagatggcacctgtcaaaagagcagtggttccatttctagattgtggatcttcagataaattctgccattttcatttcacttcctgaaagtcagagatggcttgtgaaaagttgttaaacaccatgctaaatgtgaaatgtcaaccctcactctaaactttccctgttcagagcatcagatgaagacttcattgggttttatagtggctttctgatttttggtagtccattgaagaagggagtttgaaagttgttgtatactgttaacgattgtctgcccatgtcctgcctgaaataccatgattgtttatggaaagtatctttaataaagctggatacagtttggcttggaaaaaaaaaaaaaa

SEQ ID NO: 8019 - protein, 74 aa, Homo sapiens
MWNFVLLFFFFKAMLLAHRTLHCCFWGKGHMSLIECLQSWIDVEKTPFPSSFERLPLGSQEEGFPDFDTHGHLG

SEQ ID NO: 8020 - DNA, 874 bp, Homo sapiens
ccggagcagtgtgaagaagaggcgagaacgacccccagaccgaccaaagcccgcgcgccactgcatcccgcgtccagcacctacgtcctgctgccgtcgccgccaccaccatgcccaagagaaaggctgaaggggatgctaagggagataaagccaaggtgaaggacgaaccacagagaagatccgcgaggttgtctgctaaacctgctcctccaaagccagagcccaagactaaaaaggcccctgcaaagaagggagagaaggtacccaaagggaaaaagggaaaagctgatgctggcgaggagggattccctgactttgacacacatggccaccttggcacaaaagccttgtggtatagaaagacaaatttgtttttatgtcctcttctccctttccatctttcagcatagacttaactcccttaagcccagacatctgttgggacctgacccctagtcattggttaccagtgtgtcaggcaatctggactttccagtgatgccactgagatggcacctgtcaaaagagcagtggttccatttctagattgtggatcttcagataaattctgccattttcatttcacttcctgaaagtcagagatggcttgtgaaaagttgttaaacaccatgctaaatgtgaaatgtcaaccctcactctaaactttccctgttcagagcatcagatgaagacttcattgggttttatagtggctttctgatttttggtagtccattgaagaagggagtttgaaagttgttgtatactgttaacgattgtctgcccatgtcctgcctgaaataccatgattgtttatggaaagtatctttaataaagctggatacagtttggcttggaaaaaaaaaaaaaa

SEQ ID NO: 8021 - protein, 100 aa, Homo sapiens
MPKRKAEGDAKGDKAKVKDEPQRRSARLSAKPAPPKPEPKTKKAPAKKGEKVPKGKKGKADAGEEGFPDFDTHGHLGTKALWYRKTNLFLCPLLPFHLSA

SEQ ID NO: 8022 - DNA, 658 bp, Homo sapiens
ccggagcagtgtgaagaagaggcgagaacgacccccagaccgaccaaagcccgcgcgccactgcatcccgcgtccagcacctacgtcctgctgccgtcgccgccaccaccatgcccaagagaaaggctgaaggggatgctaagggagataaagccaaggtgaaggacgaaccacagagaagatccgcgaggttgtctgctaaacctgctcctccaaagccagagcccaagactaaaaaggcccctgcaaagaagggagagaaggtacccaaagggaaaaagggaaaagctgatgctggcaaggaggggaataaccctgcagaaaatggagatgccaaaacagaccaggcacagaaagctgaaggtgctggagatgccaagtgaagtgtgtgcatttttgataactgtgtacttctggtgactgtacagtttggaatactattttttatcaagttttataaaaatgtggaattttgttttacttttttttttttttaaagctatgttgttagcacacagaacacttcattgttgtttttgggggaaggggcatatgtcactaatagaatgtctccaaagctggattgatgtggagaaaacacctttcccttctagttttgagagatttgacacacatggccaccttggcacaaaagcct

SEQ ID NO: 8023 - protein, 64 aa, Homo sapiens
MWNFVLLFFFFKAMLLAHRTLHCCFWGKGHMSLIECLQSWIDVEKTPFPSSFERFDTHGHLGTK

SEQ ID NO: 8024 - DNA, 504 bp, Homo sapiens
ccggagcagtgtgaagaagaggcgagaacgacccccagaccgaccaaagcccgcgcgccactgcatcccgcgtccagcacctacgtcctgctgccgtcgccgccaccaccatgcccaagagaaaggctgaaggggatgctaagggagataaagccaaggtgaaggacgaaccacagagaagatccgcgaggttgtctgctaaacctgctcctccaaagccagagcccaagactaaaaaggcccctgcaaagaagggagagaaggtacccaaagggaaaaagggaaaagctgatgctggcaaggaggggaataaccctgcagaaaatggagatgccaaaacagaccaggcacagaaagctgaaggtgctggagatgccaagtgaagtgtgtgcatttttgataactgtgtacttctggtgactgtacagtttggaatactattttttatcaagttttataaaaatgaatgtctccaaagctggattgatgtggagaaaacacctt

SEQ ID NO: 8025 - protein, 90 aa, Homo sapiens [sequence omitted]

SEQ ID NO: 8026 - DNA, 847 bp, Homo sapiens
ggaggataaggctaaagacagaggctccagctaccttggtgacaaggaatggaggagaaaaggaacaggaaattttaataagattaggagggcttgcttttctgccaagtgagccgctttcacaggagcgataaattggaaatgttatctggcttgatatgccagtttttctgagaaaatcactctgccagtggtgacagaatggaagagctgaaaacatcttcttttttcaaagtcatatgtcacgaaccaaggagactccaaaaaataaattatggaagattatgaccactgctgccaaggatacagtgaaataggtacatcttgtatgcccagtaatgttgaaaattaatataaccttatttaaaaagcaatttggagatgttgaaagaaagcctgaagattaccaccatgcttcatgattctatccaggtgtcccacatatgagagccaattccaaagaaataactacaacttggaaaaaactatatgcataaagatgttcattatggtgttagctatagcagcaaaacaaaaaaaaaaaacacagaaaatgtttgcaagaattcccaaatagaaaattattaagtcagctatgacattttcccagtaggatattctgcagcacttaatatgaaagtcactaagtttacatggaaaaatacctgaagcataatcttaagttaaaataaatctaaatatacttatatgctatagttgcactttttaaaaaatatgacagacagcatgaaatatccagaataggcaaattcatagagaccaaaagacaggcatagtggttgccacaggctggaggaagaaaagaatgtggagtgactgctaatgc

SEQ ID NO: 8027 - protein, 52 aa, Homo sapiens
MILSRCPTYESQFQRNNYNLEKTICIKMFIMVLAIAAKQKKKTQKMFARIPK

SEQ ID NO: 8028 - DNA, 410 bp, Homo sapiens
caaggaatggaggagaaaaggaacaggaaattttaataagattaggagggcttgcttttctgccaagtgagccgctttcacaggagcgataaattggaaatgttatctggcttgatatgccagtttttctgagaaaatcactctgccagtggtgacagaatggaagagctgaaaacatcttcttttttcaaagtcatatgtcacgaaccaaggagactccaaaaaataaattatggaagattatgaccactgctgccaaggatacagtgaaataggctgcatttgtaaccaagccgtggtccttttcattgcatcttgccagaatgaagaagagctgatctctccagttcctgttattccccttacattgcccacatttattgctcaataaaccacagaaatccttctgt

SEQ ID NO: 8029 - protein, 52 aa, Homo sapiens
MEDYDHCCQGYSEIGCICNQAVVLFIASCQNEEELISPVPVIPLTLPTFIAQ

SEQ ID NO: 8030 - DNA, 6752 bp, Homo sapiens
atgcctaagacccatggggccatcagacagtctctggggctccaggtcgctggagcaatgcgcctggggtgttgggccttcgtcaagggttacgctaaggacatggtgacagactttgatgagaaacatgatgagtatttaatattgcttcagcagaggaaccggatattaaagcatttgaaaagcaaggaccccgtgcaattgaggctggagcacttggagcaaggtttctctgtctatgtcaacggtgccaattcggagctgaaatcatcaccgcggaaagctattcactctgacttctccagaagtgcctcccacacggaggggacacacgattatggacgaagaactctgtttcgagaagctgaagaagccttaagacgcagttcacggacagcccccagtaaagtccagcgccgaggatggcaccagaaatctgtgcagatcagaacagaagctggcccacggctccacatcgaacctcctgtggactattctgatgattttgagctgtgtggggatgtgactctccaggcaaacaacacttctgaggatcgtccgcaggataccaaatctcccaccagtaccaagccctgtggttttaacttctcccttctgaatgcatgtggacattctgacccttcaagcagcgtggacaaagaaaggatcctcttaactattcaggatgtgatggagctgagaagaagcctggaacttagtgtaaatctacaaaggaaacaaaaggattgttccagcgatgagtatgactctattgaggaagacatactctctgagcctgagccagaggacccggcactggtgggccatcccagacatgaccgccctccttccagtggcgactggactcagaaagatgttcacggggaacaggagacagaaggacgctcttctccaggcccagacaccctcgtggtgctggaatttaacccagcttccaaaagtcataaaagggaaaggaatttgtctgcaaagcggaaggacaatgctgaggttttcgttcccaccaaacctgagccaaacctgactccccaagctcctgctgtattcccagaccaggagaggatgtgctccagacctggaagccggcgagagagacccctgtctgcaacccgcaaaactctttgcgaggctgagtacccagaggaagatgcctctgctgtgctccaagccatccaggtggagaacgcagccctgcagagggcgctcctcagcagaaaggccgagcagccagccagcccactgcaggatgcagaaggaccaccagcaaaaccatggaccagtctgctggaggagaaggaagagacccttgagctgcttcccatcaccacggcgactactactcaggagccggccggggcagcaggaggagccagggccatcaaccaggccatggacagaattgggcttctgggaagcagacaacagcagaagcttctgaaagtcctccaggccgtcgaaagtgactctgcccatctcggcagggtggtttcaccaaccaaggagcaagtatcagacacagaggacaaacagagaatgagggcagacgagatcaaagatgccatctacgtgaccatggagatcctgtccaactggggcaactcgtggtgggtgggtctcacagaagtcgagttctttgacttgaatgacacaaagctttatgtgtcgccccacgatgtggatatccggaacacagccacgcctggggagctgggccgcctcgtcaacaggaacttagctggcaagaaagactcctccccgtggacctgccccttccacccaccactccagctgttttttgttattcgaaacacaagacagctgggggacttccatctggccaagatcaaggttcggaattactggacagctgatggcgatcttgacattggtgccaagaacgtgaagctttacgtcaacagaaacctcatcttcaatggcaagttagacaaaggagatagggaggccccagctgaccacagcatcctggttgaccagaagaacgagaagagcgagcaactagaggaggccatgaacgctcactcggaagaaagcaaaggcacccatgagatggctggtgccagcggggacaaggagcttggtctcggttgctcaccgccagctgaaacattagcggatgcaaagctttcttcacaaggaaatgtgtctggcaaaagaaagaattctactaattgcaggaaagacagtttgtcccagttagaggaatatttgagactgtcggcagtccccacttcgatgggtgacatgcccagtgctcctgccacttccccacctgtgaagtgccctcctgtccatgaggagccctctctcatccaacaactggaaaacctcatgggcagaaaaatctgtgagccacccgggaaaaccccatcctggttacaaccttctcccaccggcaaggacaggaagcagggaggcaggaagccaaaacccctctggcttagtcccgagaagcccctggcctggaagggcaggctcccatcagacgatgtcatcggtgagggtcctggagagaccgaggccagggataaaggcctacggcatgagccagggtgggggaccagccggagtgtcaacaccaaggagagaccccagagggcaaccaccaaagtccacagtgatgactcagacatctttaaccagccccccaacagagagcgccctgctagtgggaggaggggctcaaggaaggatgctggcagcagtagtcatggggacgaccagccagccagcagagaagacacctggtcttccaggacgccgtcacggtcaaggtggcgcagtgagcaggagcacacacttcacgagtcatggagctccctcagtgccttcgaccgctcccaccggggacgcatctccaacacggagctcccgggggacatcctggatgagctcctgcagcaaaagagcagccggcacagcgacttgcccccctccaagaagggggagcagccagggctgtcgagagggcaggatggctactctggagagacagacgctgggggtgactttaaaatccccgtcttgccttatggacagcgcttggtcattgacatcaagtctacctggggggacagacactatgtcggcctcaacggaatagaaatattcagttccaagggtgaaccggtgcagatttcaaacataaaagcagaccctcccgatatcaatattttaccagcctatgggaaagacccccgcgtggtcaccaacctcatcgacggggtgaacaggacccaggatgacatgcatgtctggctggcccccttcacgcggggcagatcccactccatcaccattgacttcacgcacccttgccacgttgccctgatcagaatttggaactacaataaatctcggatacattccttccgaggcgtgaaggacatcacaatgctgttagacacccagtgcatctttgaaggagaaatcgccaaggcctctggaaccctggcgggagccccagagcactttggagacacgatcttattcacaaccgatgatgacattctcgaggccatattctattctgatgagatgtttgacctggatgtggggagcctggacagcctgcaggatgaagaggcaatgaggaggcccagcacggccgacggcgagggggatgagcggcccttcacccaggctggcttgggggctgatgaacggatcccggagctagagctcccatccagttcccctgtcccccaagtcaccacgccagagccaggcatctaccacggaatctgccttcagctgaatttcactgcctcctggggagacttgcactacctggggctcactggcctggaagtggtgggcaaggagggccaggcgctgcccatccacctgcaccagatctctgcttcccccagagacttaaatgagctccccgagtactctgacgactcccgggccctggacaagttaattgatggcaccaacatcaccatggaggatgagcatatgtggctgatccccttctcgccggggctggaccatgtggtcacgatccgcctggacagggccgaaagcatcgcaggcctgcgcttctggaactacaataaatctcccgaggacacctatcgcggggccaagattgtccacgtctccctggatggcctgtgcgtctccccgccagagggctttctcatccggaaggggccaggcaactgccactttgattttgctcaagaaatcctcttcgtggactacctacgggctcagctgctgccccagccggccaggaggctggacatgagaagcctggagtgtgcaagcatggactacgaggcaccgctgatgccctgtggcttcattttccagtttcagcttctcaccagctggggcgacccctactacatcggcctcaccggcctggagctgtatgacgagcgaggagaaaaaatccccttgtcggaaaacaatattgcggccttccccgacagcgtgaactccctggagggtgtgggcggggacgtccgcaccccagacaagctcatcgaccaagtgaacgacaccagtgatggccggcacatgtggctggctcccatcctgccgggcctggtgaaccgggtttatgtgattttcgatctgcctaccaccgtgtcaatgatcaaactgtggaattatgcgaaaacaccccatcgaggggtgaaggagtttggcctcctggtggacgacctgcttgtgtacaatgggatcctggccatggtgagccacctggtggggggcatcctgcccacatgtgagcccaccgtgccctaccacaccatcctcttcaccgaggacagggacatccgccaccaggagaaacacaccaccatcagtaatcaggccgaggatcaagatgtccagatgatgaatgaaaaccaaatcattaccaacgcgaaacggaagcagagcgttgttgacccagccttacgtcccaaaacctgcatcagcgagaaggagacgagacgacggcgctgctgactggtgaaggagggagagctggtcctcccactatggtgggctccgtcagcagccccactcagtgcctgcgtccctcaccctcagtcccaggagctggaagcgaaccacagtgttgaggggagcccgctgggaagaggggactcgggaggacagccctggatactaccagagtgacagatggctgtggctgcagggcaaagagatcccctgcagttctgggttggccacagggagcccaggacacccgccttcatgcctctgctgtgagacccagcaaagcagggcccatgaccactagggcctgggctgaccctgactcagaacaggacaatgacggggtggggaggcatcccatccagcctcagagggcccagagaatggctgagcaggacagtgggagaccagaccctaccccgcaactccagtaagcagggcactgcccagggagactgccttcagaaacctgagcttcagcggccaacaccccccatcccctgcgcatccttgtctcatttggggactggtggagctggctgagaggttggggtagtttcctggttacaggggtccacaagaccctctctcatcccggtataggggcctctctcctctcatcgggcctgataagggattggccaaggctgtgtgcatcctgcagagggaaggaagtcagctgggccacccgccatccaccttggcaagagctgggcccactctggcaggccagggtatcatctgcgtgctgctgccgggccaggaagggtgggtgggtggccagcaggctggcagctccagaccccagagggccagaagaactcaccccagtgccctctggatgcaggtgttggggaacactgaggacaatcccccatctcccctcacccttgagcaggccctccctgcactctctgccacatgtccctcctggtctgatcacggctgtgctcactgatgtggctgctttctgtctctgcccctgtgcccttggaggcaggcagtgaggtgctcctttcccaggcccccaccccttctcccccttcagccacttcccagcgagttggaaatgtgccttgcacccccagccgagtgaagcccagaacgcatctatatgcatcgatgtaacaagctcggatcagggacctaattggtttcccagtagtgggtaatttctcgttgcaaatattaatccgttgtttttctggcgcccagcccggcccgccgcagtactgtactcgaggtacgttcctatgcaaccgagagccccggcaaatacttcatgagcttagcagcctgggctcgagcagctatgcaaacgcgcttttcatttggagcacggggctgatgtgaagataagaattgtttctcctggagaaagatccatcatttctccagcttccaagcccccggcacctctgctcagctcccagatgtgacgagcacctcccgccagggggagtcaggggttgatcaaaccagctcttgtgacccaaaccagtgccgctgcattaaagggaggcccagctactccttcccagctgagatgtgggtacaggtcagatttgtcagggagatggcactaacacgacacaagctcactcccagaaccgcagctgatgtttataataatcgtatgtactgtgcaatttaggaggggaaaaaaaggctgtacaagctttaactctaaaataaatttctatttttttcctcttgcaaaattaataaaagatgttattaagaatata

SEQ ID NO: 8031 - protein, 1669 aa, Homo sapiens
MPKTHGAIRQSLGLQVAGAMRLGCWAFVKGYAKDMVTDFDEKHDEYLILLQQRNRILKHLKSKDPVQLRLEHLEQGFSVYVNGANSELKSSPRKAIHSDFSRSASHTEGTHDYGRRTLFREAEEALRRSSRTAPSKVQRRGWHQKSVQIRTEAGPRLHIEPPVDYSDDFELCGDVTLQANNTSEDRPQDTKSPTSTKPCGFNFSLLNACGHSDPSSSVDKERILLTIQDVMELRRSLELSVNLQRKQKDCSSDEYDSIEEDILSEPEPEDPALVGHPRHDRPPSSGDWTQKDVHGEQETEGRSSPGPDTLVVLEFNPASKSHKRERNLSAKRKDNAEVFVPTKPEPNLTPQAPAVFPDQERMCSRPGSRRERPLSATRKTLCEAEYPEEDASAVLQAIQVENAALQRALLSRKAEQPASPLQDAEGPPAKPWTSLLEEKEETLELLPITTATTTQEPAGAAGGARAINQAMDRIGLLGSRQQQKLLKVLQAVESDSAHLGRVVSPTKEQVSDTEDKQRMRADEIKDAIYVTMEILSNWGNSWWVGLTEVEFFDLNDTKLYVSPHDVDIRNTATPGELGRLVNRNLAGKKDSSPWTCPFHPPLQLFFVIRNTRQLGDFHLAKIKVRNYWTADGDLDIGAKNVKLYVNRNLIFNGKLDKGDREAPADHSILVDQKNEKSEQLEEAMNAHSEESKGTHEMAGASGDKELGLGCSPPAETLADAKLSSQGNVSGKRKNSTNCRKDSLSQLEEYLRLSAVPTSMGDMPSAPATSPPVKCPPVHEEPSLIQQLENLMGRKICEPPGKTPSWLQPSPTGKDRKQGGRKPKPLWLSPEKPLAWKGRLPSDDVIGEGPGETEARDKGLRHEPGWGTSRSVNTKERPQRATTKVHSDDSDIFNQPPNRERPASGRRGSRKDAGSSSHGDDQPASREDTWSSRTPSRSRWRSEQEHTLHESWSSLSAFDRSHRGRISNTELPGDILDELLQQKSSRHSDLPPSKKGEQPGLSRGQDGYSGETDAGGDFKIPVLPYGQRLVIDIKSTWGDRHYVGLNGIEIFSSKGEPVQISNIKADPPDINILPAYGKDPRVVTNLIDGVNRTQDDMHVWLAPFTRGRSHSITIDFTHPCHVALIRIWNYNKSRIHSFRGVKDITMLLDTQCIFEGEIAKASGTLAGAPEHFGDTILFTTDDDILEAIFYSDEMFDLDVGSLDSLQDEEAMRRPSTADGEGDERPFTQAGLGADERIPELELPSSSPVPQVTTPEPGIYHGICLQLNFTASWGDLHYLGLTGLEVVGKEGQALPIHLHQISASPRDLNELPEYSDDSRALDKLIDGTNITMEDEHMWLIPFSPGLDHVVTIRLDRAESIAGLRFWNYNKSPEDTYRGAKIVHVSLDGLCVSPPEGFLIRKGPGNCHFDFAQEILFVDYLRAQLLPQPARRLDMRSLECASMDYEAPLMPCGFIFQFQLLTSWGDPYYIGLTGLELYDERGEKIPLSENNIAAFPDSVNSLEGVGGDVRTPDKLIDQVNDTSDGRHMWLAPILPGLVNRVYVIFDLPTTVSMIKLWNYAKTPHRGVKEFGLLVDDLLVYNGILAMVSHLVGGILPTCEPTVPYHTILFTEDRDIRHQEKHTTISNQAEDQDVQMMNENQIITNAKRKQSVVDPALRPKTCISEKETRRRRC

SEQ ID NO: 8032 - DNA, 501 bp, Homo sapiens
attaaagcatttgaaaagcaaggaccccgtgcaattgaggctggagcacttggagcaaggtttctctgtctatgtcaacggtgccaattcggagctgaaatcatcaccgcggaaagctattcactctgacttctccagaagtgcctcccacacggaggggacacacgattatggacgaagaactctgtttcgagaagctgaagaagccttaagacgcagttcacggacagcccccagtaaagtccagcgccgaggatggcaccaggtctggagactgtggccccagcccacgctttagaatacagagtgtgggtggctgtgggaatagaaatacaatcagagcatttaaaacccccatgggccaggcacagtggctcctttatgcaatcccagcattttgggagggtgaggtgggaggatcactttgagcccagaagttcgagaccagcttgggcaacaaagtgagacttcatctctactaaaaataaaaataaaaaattc

SEQ ID NO: 8033 - protein, 69 aa, Homo sapiens
MAPGLETVAPAHALEYRVWVAVGIEIQSEHLKPPWARHSGSFMQSQHFGRVRWEDHFEPRSSRPAWATK

SEQ ID NO: 8034 - DNA, 2262 bp, Homo sapiens
atggatcccatcgtcaaaaaatggcggcattagcaggatctgagggtggaggttttggccttctgatgtcaaaaggcgaatcgggagacacggaaaccctcactgtgcatcctctatagaggggtcagaaccactccatgaaatctgtgcagatcagaacagaagctggcccacggctccacatcgaacctcctgtggactattctgatgattttgagctgtgtggggatgtgactctccaggcaaacaacacttctgaggatcgtccgcaggataccaaatctcccaccagtaccaagccctgtggttttaacttctcccttctgaatgcatgtggacattctgacccttcaagcagcgtggacaaagaaaggatcctcttaactattcaggatgtgatggagctgagaagaagcctggaacttagtgtaaatctacaaaggaaacaaaaggattgttccagcgatgagtatgactctattgaggaagacatactctctgagcctgagccagaggacccggcactggtgggccatcccagacatgaccgccctccttccagtggcgactggactcagaaagatgttcacggggaacaggagacagaaggacgctcttctccaggcccagacaccctcgtggtgctggaatttaacccagcttccaaaagtcataaaagggaaaggaatttgtctgcaaagcggaaggacaatgctgaggttttcgttcccaccaaacctgagccaaacctgactccccaagctcctgctgtattcccagaccaggagaggatgtgctccagacctggaagccggcgagagagacccctgtctgcaacccgcaaaactctttgcgaggctgagtacccagaggaagatgcctctgctgtgctccaagccatccaggtggagaacgcagccctgcagagggcgctcctcagcagaaaggccgagcagccagccagcccactgcaggatgcagaaggaccaccagcaaaaccatggaccagtctgctggaggagaaggaagagacccttgagctgcttcccatcaccacggcgactactactcaggagccggccggggcagcaggaggagccagggccatcaaccaggccatggacagaattgggcttctgggaagcagacaacagcagaagcttctgaaagtcctccaggccgtcgaaagtgactctgcccatctcggcagggtggtttcaccaaccaaggagcaagtatcagacacagaggacaaacagagaatgagggcagacgagatcaaagatgccatctacgtgaccatggagatcctgtccaactggggcaactcgtggtgggtgggtctcacagaagtcgagttctttgacttgaatgacacaaagctttatgtgtcgccccacgatgtggatatccggaacacagccacgcctggggagctgggccgcctcgtcaacaggaacttagctggcaagaaagactcctccccgtggacctgccccttccacccaccactccagctgttttttgttattcgaaacacaagacagctgggggacttccatctggccaagatcaaggttcggaattactggacagctgatggctctctctctgctgcccaggctggagtgcagtggcgtgatcatggctcactgtagcctcgacctcctgggctcaagcgttcctcccacctcagcctcccaagtagctgggactccaggtgtgcacaccacacacagctagtttttttattttttgtagagataggctggtctcaaactcttgacctcaagtcatcctcccgcctcagcttcccaaagtgctgggattacaggcgtgagccaccacgcccggtcctgattgaggaatttaaaagactactctggttgatttggagaatggatcagggggcagagggagccccgagagaggaggctcaaggcatagaacagcctaagaacagcctcgctgaagatggtggtggcctggatgagggtgtcagtgctcttggggtgcactttaggtgggctcaactcatcctatgaccatttgcattttcagcaatgcctttttctggaaagaagttttcaaatgaatgcaaaagtgaagagattagttcagtaatgaggcgtgtatccatcacctgcttcaataattacaaacattctgctattgttgtttcacgtatccccttaacatttgaaagtaaattgtagctatcacactatttcactcataaatccttcagtatacatctctaac

SEQ ID NO: 8035 - protein, 506 aa, Homo sapiens
MKSVQIRTEAGPRLHIEPPVDYSDDFELCGDVTLQANNTSEDRPQDTKSPTSTKPCGFNFSLLNACGHSDPSSSVDKERILLTIQDVMELRRSLELSVNLQRKQKDCSSDEYDSIEEDILSEPEPEDPALVGHPRHDRPPSSGDWTQKDVHGEQETEGRSSPGPDTLVVLEFNPASKSHKRERNLSAKRKDNAEVFVPTKPEPNLTPQAPAVFPDQERMCSRPGSRRERPLSATRKTLCEAEYPEEDASAVLQAIQVENAALQRALLSRKAEQPASPLQDAEGPPAKPWTSLLEEKEETLELLPITTATTTQEPAGAAGGARAINQAMDRIGLLGSRQQQKLLKVLQAVESDSAHLGRVVSPTKEQVSDTEDKQRMRADEIKDAIYVTMEILSNWGNSWWVGLTEVEFFDLNDTKLYVSPHDVDIRNTATPGELGRLVNRNLAGKKDSSPWTCPFHPPLQLFFVIRNTRQLGDFHLAKIKVRNYWTADGSLSAAQAGVQWRDHGSL

SEQ ID NO: 8036 - DNA, 592 bp, Homo sapiens
cgtggtgatacgtgcctgtagtcccagctacttgggagggcaaggcaagaggatcacttgagcctaggagttcgaggctgcagtgagctatgatcacgtcactatgctccagcctgggtgacaaagcgagatcctggctctaaagaaaaagtgagcaaagaagggctcagagaaggacaagtgactaaaagaaaaatgatgcaggaggaaattgagagacaaggtctccgtgggagcctgtgaatggggctggcacccagccagatgcccacgagggctgttattataggaggctctggagctaagaggggctggggacggcatgatcaagattacatctttggctgggcgcggtggttcatgcctgtaatcccagcactatgagaggctgaggagggcggatcagttgagatcaggagttcgagaccagccttggcctcccaaagtgttgggattacaggtgtaagccactgtgcctggccgctcatttagttctcaaagcaacccaagggggaaactgagtcacaagggtgtaggccacttgcccaaggccacacagcgaggaagttgcacagcctaatcacaggcctga

SEQ ID NO: 8037 - protein, 46 aa, Homo sapiens
MGLAPSQMPTRAVIIGGSGAKRGWGRHDQDYIFGWARWFMPVIPAL

SEQ ID NO: 8038 - DNA, 344 bp, Homo sapiens
gctccaggcagttgctgtcaccctcacattcctgttcctgttttctacaaagggactgtcagcctgagcatgcctgcccttgaccgtgaccctgctgtgtcttaggccaggagtgttgcctgagacatctgtttaataagcctttccatcctcagctgcttcccatcaccacggcgactactactcaggagccggccggggcagcaggaggagccagggccatcaaccaggccatggacagaattgggcttctgggaagcagacaacagcagaagcttctgaaagtcctccaggccgtcgaaagtgactctgcccatctcggcagggtggtttcaccaaccaag

SEQ ID NO: 8039 - protein, 36 aa, Homo sapiens
MDRIGLLGSRQQQKLLKVLQAVESDSAHLGRVVSPT

SEQ ID NO: 8040 - DNA, 548 bp, Homo sapiens
ctgctgttaccgcccttggttcatggcttctttcacttggaaaccccaggagctaagttcctgttgacgaggcggcccagctccccaggcgtggctgtgttccggatatccacatcgtggggcgacacataaagctttgtgtcattcaagtcaaagaactcgacttctgtgagacccacccaccacgagttgccccagttggacaggatctccatggtcacgtagatggcatctttgatctcgtctgccctcattctctgtttgtccttaaagaagagaaaaataacaccaaaggattaagtcatgacaggcttgaattcggctctgcctctgccaccactgccttcaaaaagttagttaaccttcagggtctcagtctctccatctgtacaatgaggataagaatagcacccactacctatggttattacaatgattaaatgaattcatactgtaaagcattcaaaatagaggccctgtgtaactggcactctgtgagcattctgtttgaaagtttacaaataaataaaaatgtctaaaaagcattg

SEQ ID NO: 8041 - protein, 32 aa, Homo sapiens
MNSYCKAFKIEALCNWHSVSILFESLQINKNV

SEQ ID NO: 8042 - DNA, 943 bp, Homo sapiens
cttattctggcaagtttctccagctctacaagaacttctagtgctctgggcagctgcgaggggtcaagaaaccacatccccaaatccagcgggatctcagagagaaaggctgatgggaagctgcccagggctgacctggcacatgctgggaaaacccctcggtgccagggcaggaggcagagcgtctgcagctcctccctccccaacacaggggagacagggttttgccttgttgcccaggctggtcttgaactcctgacctcaaatgatccgcctgcctcagcctcccaaagtgctgggattacaggtgtgagcctctgtacctggccagattttgttgttcttcccctccctccactcatacccttaacacagatttaccaagggcagagaaaatgcatgggaatacacagccaagaagcaatccagtgccccttccactcacagctaagttcctgttgacgaggcggcccagctccccaggcgtggctgtgttccggatatccacatcgtggggcgacacataaagctttgtgtcattcaagtcaaagaactcgacttctgtgagacccacccaccacgagttgccccagttggacaggatctccatggtcacgtagatggcatctttgatctcgtctgccctcattctctgtttgtccttaaagaagagaaaaataacaccaaaggattaagtcatgacaggcttgaattcggctctgcctctgccaccactgccttcaaaaagttagttaaccttcagggtctcagtctctccatctgtacaatgaggataagaatagcacccactacctatggttattacaatgattaaatgaattcatactgtaaagcattcaaaatagaggccctgtgtaactggcactctgtgagcattctgtttgaaagtttacaaataaataaaaatgtctaaaaagcattg

SEQ ID NO: 8043 - protein, 48 aa, Homo sapiens
MGSCPGLTWHMLGKPLGARAGGRASAAPPSPTQGRQGFALLPRLVLNS

SEQ ID NO: 8044 - DNA, 656 bp, Homo sapiens
caagaacttctagtgctctgggcagctgcgaggggtcaagaaaccacatccccaaatccagcgggatctcagagagaaaggctgatgggaagctgcccagggctgacctggcacatgctgggaaaacccctcggtgccagggcaggaggcagagcgtctgcagctcctccctccccaacacaggggctaagttcctgttgacgaggcggcccagctccccaggcgtggctgtgttccggatatccacatcgtggggcgacacataaagctttgtgtcattcaagtcaaagaactcgacttctgtgagacccacccaccacgagttgccccagttggacaggatctccatggtcacgtagatggcatctttgatctcgtctgccctcattctctgtttgtccttaaagaagagaaaaataacaccaaaggattaagtcatgacaggcttgaattcggctctgcctctgccaccactgccttcaaaaagttagttaaccttcagggtctcagtctctccatctgtacaatgaggataagaatagcacccactacctatggttattacaatgattaaatgaattcatactgtaaagcattcaaaatagaggccctgtgtaactggcactctgtgagcattctgtttgaaagtttacaaa

SEQ ID NO: 8045 - protein, 38 aa, Homo sapiens
MGSCPGLTWHMLGKPLGARAGGRASAAPPSPTQGLSSC

SEQ ID NO: 8046 - DNA, 1262 bp, Homo sapiens
aatgacggggtggggaggcatcccatccagcctcagagggcccagagaatggctgagcaggacagtgggagaccagaccctaccccgcaactccagtaagcagggcactgcccagggagactgccttcagaaacctgagcttcagcggccaacaccccccatcccctgcgcatccttgtctcatttggggactggtggagctggctgagaggttggggtagtttcctggttacaggggtccacaagaccctctctcatcccggtataggggcctctctcctctcatcgggcctgataagggattggccaaggctgtgtgcatcctgcagagggaaggaagtcagctgggccacccgccatccaccttggcaagagctgggcccactctggcaggccagggtatcatctgcgtgctgctgccgggccaggaagggtgggtgggtggccagcaggctggcagctccagaccccagagggccagaagaactcaccccagtgccctctggatgcaggtgttggggaacactgaggacaatcccccatctcccctcacccttgagcaggccttcccagcgagttggaaatgtgccttgcacccccagccgagtgaagcccagaacgcatctatatgcatcgatgtaacaagctcggatcagggacctaattggtttcccagtagtgggtaatttctcgttgcaaatattaatccgttgtttttctggcgcccagcccggcccgccgcagtactgtactcgaggtacgttcctatgcaaccgagagccccggcaaatacttcatgagcttagcagcctgggctcgagcagctatgcaaacgcgcttttcatttggagcacggggctgatgtgaagataagaattgtttctcctggagaaagatccatcatttctccagcttccaagcccccggcacctctgctcagctcccagatgtgacgagcacctcccgccagggggagtcaggggttgatcaaaccagctcttgtgacccaaaccagtgccgctgcattaaagggaggcccagctactccttcccagctgagatgtgggtacaggtcagatttgtcagggagatggcactaacacgacacaagctcactcccagaaccgcagctgatgtttataataatcgtatgtactgtgcaatttaggaggggaaaaaaaggctgtacaagctttaactctaaaataaatttctatttttttcctcttgcaaaattaataaaagatgttattaagaatata

SEQ ID NO: 8047 - protein, 59 aa, Homo sapiens
MQVLGNTEDNPPSPLTLEQAFPASWKCALHPQPSEAQNASICIDVTSSDQGPNWFPSSG

SEQ ID NO: 8048 - DNA, 4537 bp, Homo sapiens
aggaatttccacaccggcatctggtactcgtgcgaggaggagctcagcgggcttggtgaaaaatgtcgcagcttcattgacctggccccggcatcggagaaaggggtcctgtggctgtctgtggtctccgaggtgctgtacattctgctgctggtggttggcttcagcctcatgtgtctcgagctcttccactccagcaatgtcatcgacgggctcaagctcaatgccttcgcggctgtcttcacggtgctctcaggcctcctgggaatggtcgcccacatgatgtacacgcaggtgttccaggtcaccgtgagcctcggtcctgaggactggagaccccattcctgggactacgggtggtccttctgcctggcgtggggctcctttacctgctgcatggcagcctctgtcaccacgctcaactcctacaccaagacggtcattgagttccggcacaagcgcaaggtctttgagcagggctaccgggaagagccgaccttcatagaccctgaggccatcaagtacttccgggagaggatggagaagagggacgggagcgaggaggactttcacttagactgccgccacgagagataccctgcccgacaccagccacacatggcggattcctggccccggagctccgcacaggaagcaccagagctgaaccgacagtgctgggtcttggggcactgggtgtgaccaagacctcaacctggcccgcggacctcaggccatcgctggcaccagcccctgctgcaagaccaccagagtggtgcccccagaaccctggcctgtgtgccgtgaactcagtcagcctgcgtgggagatgccaggcctgtcctgcccatcgctgcctgggtcccatggccttggaaatggggccagggcaggcccaagggaatgcacagggctgcacagagtgactttgggacagcagccccggactcttgccatcatcacatgagccctgctgggcacagctgcgatgccaggagacacatggccactggccactgaatggctggcacccacaagccagtcaggtgcccagaggggcagagccctttggggggcagagagtggcttcctgaaggagggggcagtggcgcaggcactgcaggggtgtcacacagcaggcacacagcaggggctcaataaatgcttgttgaacttgttttcttgcggtgtatggaggccagttgctctgtgggctgtggctgccctgtcattgccccaccccattactcctcaaggaggctgaaggtgacagcagagactgtgcagaggccagggccagacactgcagggtggcagggagggagcacagagcccaggctggacacaggctggcagggctgccttgtattccagagagtgggcaaggcaggggccaggcaagcaagagatgtggggcgagcaagaagtgggcccccaaacccaagccctaagcagggagggtgaagaagccacatttctcttcagagctcagcaacatcacaccaccctgaccctgaggaggctttaccctgtgcctagcaccacctttacagaaaatcccagggcttagatgcctggagaaacagattcttattataaagaggaggaaaattagggtcacagagatgaatgaagtaacttgcctgtgattacagagctagcaaatggcagagatggggtttgaatcaggactcctgactccaagttcagtcatttcccaagaggccttattccttcccagaagaatttctagagcttttccccacgtagaatatattcttctcctttatccttccatccttccatccatcatccatcactcatccagccattatccattatccatccatccattcatcattcgtccatctattatccacccattcatcatctattatccatccatcattcatcatccatccatcattcataattcatctttccactcatccatccatcattcattcattcatccatccttccatccatccatcatctatccattcatccatccatttgccatccatccactcattcatcagctatccatcatctatccatccatccatccatccagcatctatcactcatccagctattgtccattgtccattcatccatttttcattcatccctccatcatcattaatccattatccacccactcatcatctattatccatctatagtccatcaaccatccatccttcatcatccatccatccatccttcatccatccatccacccatccatccatccatcatctgtccatccattatctatccattcatccatccattcatcatccacccacctattcatcagctatctatccatcatccatccatccatcatccatccatccatccatccatccatcatctatccattcattgtctatgctttcatccatccattcatcatccatccacccattcgttagctatttatccattatccattcctccatctatccatcatccattcatcccttatccattcaaccattatgcatttcttcatttatccattatttatccttccatccatcatccatcatctttccatccactatctatccattcatccatctatccatcatccatccatcctttatccatcattcatcagccatcatccctccatctatccattatccatcatccactcatccattcatccctccatctgcccattatccatcaaccatccatccatccattatccgtcatccacacatccattcatccctccatctgcccattatccatcaaccatccatccatccattatccatttctgcattatccatttattctttatccatttcttcatctattcatcatctatccatccattatccttacacctatctatcatccatccattccttcatctatccatcatccatcaattatccatccattcatccatccatctatccatcttctattgattgcttgtcatccttccttgtatcagacttccatccatcctccttccatgtgtcacacatcctcattactcaaccatccagctgtgcatccatctattcactgatatagttcactgtgcccctactatgtgccaagcactgtggtaggcacttgaggtgggatgctggagcatccagagagggcatctattgtcgtgagcctgggttcagattccaccttctccacttgtgaccttgggcgagttacttgacctttctgtgcctgtttcctcatccattaaatccggataatcattatacctacctcttcaagctgttgtgcaaattaaatgagctaacatatttgaagtgtctagaacagagcctggcacaagtaaacactttgtgggtgtttactaacaggacaacaaggggaaatcggggctgtgggagctgtagtctagggaggctcctttgagaaaatgatgtctaagccaagacatgaagattgtctgggcatcagccaggcaagagtatagcagggaaagaaagtacattagaggactttaaaatagtcccaatggcaggtgtggagagcagggaggtcaggaggcagttgtgggaaattaggcatcagagggcagtggagccaggccaggaggaactggaaaccttcttagggagcttagagtttaccctggggcaatggggagtgggcagtgagatgcttttagcagactgggatgcgcctgggtgtacatttgaggaagatcaccgcaactatgggcacagaatagttgtgggagatgcttctcccttcctcatccctcttacactcaagaaagagaagaaagtgggctggcttaggaaagttgccctggggaggggaccatgcgggcagattcaggaaccaattaggagggaatagactgagtgggagaagaggaaagttggtgacgactctcaggttacagggtcagcttgggggatagggaagacggagacttcgtggttcagatgtcttgagtctcaggggctcaggggacagccagctggaggtttgtgctcattcattcacgcattgattcatcaagcgaacaatttgttaattcactttccattcattcagtaaatattaatgacctactaggtggggcttaaggcggggctggaaatgggcctgggagagcaattatggtccagctctactgaggccttgaatgtcagaacaaggaatttgggctttggcctcatgcaagagagggcggctgccatatatgggcctgggcagggacagatctgacagggatctagccctggccaccaggcatctaggagctcttgttctcacccagggtccttctgaagttggcgagtggaccgcaggaggtccaggagatgattgtagttgacacatggggaaaattttaatctattttaatagttgtgtttatgtaaatgtgtattagaaaaaaatgtacagtgggcacatcagtgctatgacttcacagacgttactgcttaggatgaaaccaaaataggcatttaagtaaaagaaaaaaagagttggcttaaagaaaaatattaaataaataatcgtg

SEQ ID NO: 8049 - protein, 176 aa, Homo sapiens; identical to SEQ ID NO: 1108

SEQ ID NO: 8050 - DNA, 1399 bp, Homo sapiens
tgacgcggggcgccagctgccaacttcgcgcgcggagctccccggcggtgcagtcccgtcccggcggcgcgggcggcatgaagactagccgccgcggccgagcgctcctggccgtggccctgaacctgctggcgctgctgttcgccaccaccgctttcctcaccacgcactggtgccagggcacgcagcgggtccccaagccgggctgcggccagggcgggcgcgccaactgccccaactcgggcgccaacgccacggccaacggcaccgccgcccccgccgccgccgccgccgccgccaccgcctcggggaacggcccccctggcggcgcgctctacagctgggagaccggcgacgaccgcttcctcttcaggaatttccacaccggcatctggtactcgtgcgaggaggagctcagcgggcttggtgaaaaatgtcgcagcttcattgacctggccccggcatcggagaaaggcctcctgggaatggtcgcccacatgatgtacacgcaggtgttccaggtcaccgtgagcctcggtcctgaggactggagaccccattcctgggactacgggtggtccttctgcctggcgtggggctcctttacctgctgcatggcagcctctgtcaccacgctcaactcctacaccaagacggtcattgagttccggcacaagcgcaaggtctttgagcagggctaccgggaagagccgaccttcatagaccctgaggccatcaagtacttccgggagaggatggagaagagggacgggagcgaggaggactttcacttagactgccgccacgagagataccctgcccgacaccagccacacatggcggattcctggccccggagctccgcacaggaagcaccagagctgaaccgacagtgctgggtcttggggcactgggtgtgaccaagacctcaacctggcccgcggacctcaggccatcgctggcaccagcccctgctgcaagaccaccagagtggtgcccccagaaccctggcctgtgtgccgtgaactcagtcagcctgcgtgggagatgccaggcctgtcctgcccatcgctgcctgggtcccatggccttggaaatggggccagggcaggcccaagggaatgcacagggctgcacagagtgactttgggacagcagccccggactcttgccatcatcacatgagccctgctgggcacagctgcgatgccaggagacacatggccactggccactgaatggctggcacccacaagccagtcaggtgcccagaggggcagagccctttggggggcagagagtggcttcctgaaggagggggcagtggcgcaggcactgcaggggtgtcacacagcaggcacacagcaggggctcaataaatgcttgttgaacttgtttt

SEQ ID NO: 8051 - protein, 280 aa, Homo sapiens
MKTSRRGRALLAVALNLLALLFATTAFLTTHWCQGTQRVPKPGCGQGGRANCPNSGANATANGTAAPAAAAAAATASGNGPPGGALYSWETGDDRFLFRNFHTGIWYSCEEELSGLGEKCRSFIDLAPASEKGLLGMVAHMMYTQVFQVTVSLGPEDWRPHSWDYGWSFCLAWGSFTCCMAASVTTLNSYTKTVIEFRHKRKVFEQGYREEPTFIDPEAIKYFRERMEKRDGSEEDFHLDCRHERYPARHQPHMADSWPRSSAQEAPELNRQCWVLGHWV

SEQ ID NO: 8052 - DNA, 1173 bp, Homo sapiens
ggcagctgagtcagtgagcagcgccatgatgaggggcagtccctgccagcaccaacaggggctggaaacccagcgataggagcatcagcatctccgaggggtcctgtggctgtctgtggtctccgaggtgctgtacattctgctgctggtggttggcttcagcctcatgtgtctcgagctcttccactccagcaatgtcatcgacgggctcaagctcaatgccttcgcggctgtcttcacggtgctctcaggcctcctgggaatggtcgcccacatgatgtacacgcaggtgttccaggtcaccgtgagcctcggtcctgaggactggagaccccattcctgggactacgggtggtccttctgcctggcgtggggctcctttacctgctgcatggcagcctctgtcaccacgctcaactcctacaccaagacggtcattgagttccggcacaagcgcaaggtctttgagcagggctaccgggaagagccgaccttcatagaccctgaggccatcaagtacttccgggagaggatggagaagagggacgggagcgaggaggactttcacttagactgccgccacgagagataccctgcccgacaccagccacacatggcggattcctggccccggagctccgcacaggaagcaccagagctgaaccgacagtgctgggtcttggggcactgggtgtgaccaagacctcaacctggcccgcggacctcaggccatcgctggcaccagcccctgctgcaagaccaccagagtggtgcccccagaaccctggcctgtgtgccgtgaactcagtcagcctgcgtgggagatgccaggcctgtcctgcccatcgctgcctgggtcccatggccttggaaatggggccagggcaggcccaagggaatgcacagggctgcacagagtgactttgggacagcagccccggactcttgccatcatcacatgagccctgctgggcacagctgcgatgccaggagacacatggccactggccactgaatggctggcacccacaagccagtcaggtgcccagaggggcagagccctttggggggcagagagtggcttcctgaaggagggggcagtggcgcaggcactgcaggggtgtcacacagcaggcacacagcaggggctcaataaatgcttgttgaacttgt

SEQ ID NO: 8053 - protein, 176 aa, Homo sapiens; identical to SEQ ID NO: 1108

SEQ ID NO: 8054 - DNA, 343 bp, Homo sapiens
cacatggcggattcctggccccggagctccgcacaggaagcaccagagctgaaccgacagtgctgggtcttggggcactgggtgtgaccaagacctcaacctggcccgcggacctcaggccatcgctggcaccaccctgctgggcacagctgcgatgccaggagacacatggccactggccactgaatggctggcacccacaagccagtcaggtgcccagaggggcagagccctttggggggcagagagtggcttcctgaaggagggggcagtggcgcaggcactgcaggggtgtcacacagcaggcacacagcaggggctcaataaatgcttgttgaacttg

SEQ ID NO: 8055 - protein, 62 aa, Homo sapiens
MPGDTWPLATEWLAPTSQSGAQRGRALWGAESGFLKEGAVAQALQGCHTAGTQQGLNKCLLN

SEQ ID NO: 8056 - DNA, 777 bp, Homo sapiens
ccccctggcggcgcgctctacagctgggagaccggcgacgaccgcttcctcttcaggaatttccacaccggcatctggtactcgtgcgaggaggagctcagcgggcttggtgaaaaatgtcgcagcttcattgacctggccccggcatcggagaaaggggtcctgtggctgtctgtggtctccgaggtgctgtacattctgctgctggtggttggcttcagcctcatgtgtctcgagctcttccactccagcaatgtcatcgacgggctcaagctcaatgccttcgcggctgtcttcacggtgctctcagttgaagactccacgctggttttccctcagcctccctggccactctgcctcagctttctttgctggtccctcctgctctgcttaatatcagatgttggcttcatcctgggacccttctctctcctcttcctacagtctctctccaggcctcctgggaatggtcgcccacatgatgtacacgcaggtgttccaggtcaccgtgagcctcggtcctgaggactggagaccccattcctgggactacgggtggtccttctgcctggcgtggggctcctttacctgctgcatggcagcctctgtcaccacgctcaactcctacaccaagacggtcattgagttccggcacaagcgcaaggtctttgagcagggctaccgggaagagccgaccttcatagaccctgaggccatcaagtacttccgggagaggtggcaaatcgaggcacagagagggagggcgacttgccccag

SEQ ID NO: 8057 - protein, 124 aa, Homo sapiens
MLASSWDPSLSSSYSLSPGLLGMVAHMMYTQVFQVTVSLGPEDWRPHSWDYGWSFCLAWGSFTCCMAASVTTLNSYTKTVIEFRHKRKVFEQGYREEPTFIDPEAIKYFRERWQIEAQRGRATC

SEQ ID NO: 8058 - DNA, 366 bp, Homo sapiens
tcatgtcactgcactgcagcctgggtaacagagaaagaccctatctcaaaaaaaaaaaaacaaacaaaaacaaagctagaaaaccccactgacttctccaaagcctccaggaagacacgttcctcctcctcccagggctgaggtctccccactgcacagccacactcccaggtagacagaagaggcctccctgagtcacaacctcctcctccagggctccagcgattctctcagctcagcctcctgagtagctgggaccaccatgcaccaccatgcctgtctaacttttttttgtactttttgtgaagatggggtttgtccatattgcccagtctggtcttgagctcctgacctcaagtgatccac

SEQ ID NO: 8059 - protein, 54 aa, Homo sapiens
GLPTAQPHSQVDRRGLPESQPPPPGLQRFSQLSLLSSWDHHAPPCLSNFFLYFL

SEQ ID NO: 8060 - DNA, 692 bp, Homo sapiens
tggcacccgagaggccctagggacgtattcctcttgttctttttctcccacagcgcctggcacagagtctctgtgacacgcagtgcaacagtgaatagaagttttgagttttagaaagtgctcccctatcttcagtgcacactctgggatggaagtagctgttggggtctggtgggtgggtgacctggtgtgttgttggctgcagctatgcccctgccttccaggacctgccctcattcacccagaatgtgcacaggctggtcaacgacctgcgctactacagactctgcaacgacagcctgccccctggcactgtgaagctctaggcctgctactgcctggggacacggacttctgctgctgccacctgcgccagccctaccttccaccaggaaatcccgcggggtggcccatgcagaccaggcgcacgtggctcatggggcagaattgccaaggacagctcacgacagtgccaccttctcaccattccagccaaggagagatgtgacgttggaactgctctggcacttctgtcaagcctcccccgccccaattgccttgagatctctgctctttgtcagagatttgcaaagactcacgtttttgttgttttctcatcattccattgtgatactaagaaactaagaagcttaatgaaaagaaataaaatgcctatgttgttgttctagaaa

SEQ ID NO: 8061 - protein, 119 aa, Homo sapiens
MEVAVGVWWVGDLVCCWLQLCPCLPGPALIHPECAQAGQRPALLQTLQRQPAPWHCEALGLLLPGDTDFCCCHLRQPYLPPGNPAGWPMQTRRTWLMGQNCQGQLTTVPPSHHSSQGEM

SEQ ID NO: 8062 - DNA, 4297 bp, Homo sapiens
gcgggtgggtctggatgaattgtctcggggtcccccgatgaggcgacccgggcggccctgccctttttagagggtcccctcggggcccggtggggaaggggttgtctttgcatgggtgggggacttcccgagtctgccgggaccatgacctgaactgtgcgagcgggacgtgtccgaagcccaagaaccagctcatctgagccgccccctccccggccagcatggtagctcatgtaagtggagtcatgaagtatttggcctgttgtgactgccttatttcacatggcacagtgttctcaagcttcatccgtgtggtggcgtgtgtcagagcttccttccttttgaaagctgaattccattgcatctgaagaagcctctctcagggcattggaaagtctgatgacagaattttttcacgattgtacaaccaatgaaagaaaacgtgagatagaggagcttcttaataactttgcccagcaaataggagcctggagattctgcctgtactttctctccagcactaggaatgactatgtaatgatgtacagtttaacagtttttgagaatctgatcaataaaatgtggcttggggtcccatctcaggataagatggaaatccgtagctgtctgcccaaactccttttggctcaccataaaaccttaccttactttatccggaacaagctctgcaaagttattgttgatattggacgtcaggattggcccatgttctaccacgacttttttactaacattttacagttgatccagtcccctgtgacaaccccccttgggctgatcatgttgaagacaacttcagaagagctggcttgtccccgtgaggacctcagtgtggctcggaaggaggagttgcggaagctgctactggaccaggtgcagacagtgcttgggctactgacaggtatcttggagactgtctgggacaaacacagtgttactgctgccactccaccaccatccccgacctcaggagaaagtggtgacttactgagtaacctgttgcagagtcccagttcagccaaactgttgaatcagccaattcccatccttgatgtggagagtgagtatatctgttccctggctttggagtgcctggcccatctcttcagttggattcctctgtctgccagcatcaccccatccctccttaccaccatcttccactttgcacgatttggctgtgacatccgggccagaaagatggcgtcagttaacggcagcagccagaactgtgtctcgggtcaggagcgcggccggctgggggtcctggccatgtcctgcatcaatgaactcatgtccaagaactgtgtgcctatggaatttgaggagtatttactgcgtatgttccagcagactttctacctcctgcagaaaatcaccaaggataacaatgcccacacagtgaagagcaggctagaagagctcgatgagagctatatcgagaagtttactgactttcttcggctctttgtgagtgttcacctaagaagaatcgagtcttactcccagttccctgtggtggagtttttgacacttttgttcaagtacacatttcatcagcctactcatgaaggttacttctcttgtttggatatctggacgctgtttttggactatctgacaagtaaaattaaaagtcgtcttggagacaaggaagcagttctcaacaggtacgaagatgccctggtgctcctgctcacagaggtgttgaatcgaatccagttcagatacaaccaagcccagctggaggagttggatgatgagactctggatgacgatcagcagacggagtggcagcggtacttacggcagagcttggaggtggtggccaaagtgatggagctcctgcccacgcacgccttctccacactgttccctgttcttcaggacaatttagaagtttatttgggattacaacagtttatagtcacttcagggtcaggacacaggttgaacatcacggcggagaacgactgccggcggctgcactgctccctgagagacttgagctccctgctgcaggccgtgggccgcctggccgagtactttatcggggatgtgtttgctgcacggttcaatgatgccctcacagtcgtggaaaggttggtcaaagtcactctgtacggatctcagataaaattgtacaacattgaaactgctgtgccatcagtattgaaacctgacctcattgatgtgcatgctcagtccctggctgcgctgcaggcttactctcactggttagcacagtattgcagtgaagttcaccggcagaacacgcagcagttcgtgacactcatctctactaccatggatgcaatcacacctctaatcagcaccaaggtccaagacaagctgctgctatctgcgtgccacttactggtctcactggccaccaccgtgcggcccgtctttctgatcagcatccctgcagtgcagaaagtattcaacagaatcactgatgcctctgccctgcgacttgtcgataaggcccaggtgttggtgtgccgagccctctctaacatcttgctgcttccgtggccaaaccttccagagaatgagcagcagtggcccgtgcgctccatcaaccacgccagcctcatctctgcactctcccgggactatcgcaacctgaagcccagtgctgttgccccacagagaaagatgccactggatgacaccaaactgattatccaccagacactcagcgtcttagaagatattgtggagaatatctcgggggagtccaccaagtctcgacagatttgctaccagtcgctgcaggaatctgttcaggtctccctggccctctttccagcttttatccatcagtcagatgtgactgatgagatgctgagcttcttcctcactctgtttcgaggccttagagtacagatgggtgtgcctttcactgagcaaatcatacagactttcctcaacatgtttaccagagagcagttagccgagagcatcctccacgagggcagcacaggctgccgggtggtggagaagtttctgaagatcctgcaggtggtggtccaggagccaggccaggtgttcaagcccttcctccccagcatcatcgccctgtgcatggagcaagtgtatcccatcattgccgagcgtccctcccctgatgtgaaggccgagctgtttgagctccttttccggacgctccatcacaactggaggtacttcttcaagtccaccgtgctggccagtgtccagagggggatcgctgaggagcagatggagaatgagccccagttcagtgccatcatgcaggctttcggacagtcctttctccagcccgacatccacctttttaaacaaaatctcttctacttggagactctcaacaccaagcagaagctgtaccacaagaagatcttccggactgccatgctgttccagtttgtgaacgtgctgctccaggtcctggtccacaagtcccatgatcttctgcaggaggagattggcatcgccatctacaacatggcctcagtcgactttgatggcttctttgccgccttcctcccagagttcctgaccagctgtgatggtgtggatgccaaccagaaaagtgtgctggggcggaatttcaagatggatcgggacctgccctcattcacccagaatgtgcacaggctggtcaacgacctgcgctactacagactctgcaacgacagcctgccccctggcactgtgaagctctaggcctgctactgcctggggacacggacttctgctgctgccacctgcgccagccctaccttccaccacagatgtctcccagatgggccttggtcacactccttggcttctcccaccgcaagcaacgctgcctgcctctgccgctcctccacatcttgccgctgcccagcagagctggcttctgggtccacctgagcactggacggtgctcccagggcgttggagcaggcggaggggtgtgtggccaggtactaggaggcaccaggaaatcccgcggggtggcccatgcagaccaggcgcacgtggctcatggggcagaattgccaaggacagctcacgacagtgccaccttctcaccattccagccaaggagagatgtgacgttggaactgctctggcacttctgtcaagcctcccccgccccaattgccttgagatctctgctctttgtcagagatttgcaaagactcacgtttttgttgttttctcatcattccattgtgatactaagaaactaagaagcttaatgaaaagaaataaaatgcctatgttgttgttctagaaa

SEQ ID NO: 8063 - protein, 1111 aa, Homo sapiens
MTEFFHDCTTNERKREIEELLNNFAQQIGAWRFCLYFLSSTRNDYVMMYSLTVFENLINKMWLGVPSQDKMEIRSCLPKLLLAHHKTLPYFIRNKLCKVIVDIGRQDWPMFYHDFFTNILQLIQSPVTTPLGLIMLKTTSEELACPREDLSVARKEELRKLLLDQVQTVLGLLTGILETVWDKHSVTAATPPPSPTSGESGDLLSNLLQSPSSAKLLNQPIPILDVESEYICSLALECLAHLFSWIPLSASITPSLLTTIFHFARFGCDIRARKMASVNGSSQNCVSGQERGRLGVLAMSCINELMSKNCVPMEFEEYLLRMFQQTFYLLQKITKDNNAHTVKSRLEELDESYIEKFTDFLRLFVSVHLRRIESYSQFPVVEFLTLLFKYTFHQPTHEGYFSCLDIWTLFLDYLTSKIKSRLGDKEAVLNRYEDALVLLLTEVLNRIQFRYNQAQLEELDDETLDDDQQTEWQRYLRQSLEVVAKVMELLPTHAFSTLFPVLQDNLEVYLGLQQFIVTSGSGHRLNITAENDCRRLHCSLRDLSSLLQAVGRLAEYFIGDVFAARFNDALTVVERLVKVTLYGSQIKLYNIETAVPSVLKPDLIDVHAQSLAALQAYSHWLAQYCSEVHRQNTQQFVTLISTTMDAITPLISTKVQDKLLLSACHLLVSLATTVRPVFLISIPAVQKVFNRITDASALRLVDKAQVLVCRALSNILLLPWPNLPENEQQWPVRSINHASLISALSRDYRNLKPSAVAPQRKMPLDDTKLIIHQTLSVLEDIVENISGESTKSRQICYQSLQESVQVSLALFPAFIHQSDVTDEMLSFFLTLFRGLRVQMGVPFTEQIIQTFLNMFTREQLAESILHEGSTGCRVVEKFLKILQVVVQEPGQVFKPFLPSIIALCMEQVYPIIAERPSPDVKAELFELLFRTLHHNWRYFFKSTVLASVQRGIAEEQMENEPQFSAIMQAFGQSFLQPDIHLFKQNLFYLETLNTKQKLYHKKIFRTAMLFQFVNVLLQVLVHKSHDLLQEEIGIAIYNMASVDFDGFFAAFLPEFLTSCDGVDANQKSVLGRNFKMDRDLPSFTQNVHRLVNDLRYYRLCNDSLPPGTVKL

SEQ ID NO: 8064 - DNA, 4485 bp, Homo sapiens
gcggctccagggcgggcgcgcgcaaggatgctctagggggcggcggcagtggccgtgtgggttgaggctgcgaggacagcgcgggcccccgggcctctcccctgagccggccgcctgggccgcgcggtcgaggcctgtcagcctccgcccgttcagcctcggggccggggccgccgccacctctgcccgcggaggccggggagcccctgcctgggcccgcagcctcccccgcgggggtcgggcccgggcgggggtcccgagcagctgccctcctcgccggcatccgagcctcatttcctgctttttcagtttccttggggaggggcgggtgggtctggatgaattgtctcggggtcccccgatgaggcgacccgggcggccctgccctttttagagggtcccctcggggcccggtggggaaggggttgtctttgcatgggtgggggacttcccgagtctgccgggaccatgacctgaactgtgcgagcgggacgtgtccgaagcccaagaaccagctcatctgagccgccccctccccggccagcatggcatctgaagaagcctctctcagggcattggaaagtctgatgacagaattttttcacgattgtacaaccaatgaaagaaaacgtgagatagaggagcttcttaataactttgcccagcaaataggagcctggagattctgcctgtactttctctccagcactaggaatgactatgtaatgatgtacagtttaacagtttttgagaatctgatcaataaaatgtggcttggggtcccatctcaggataagatggaaatccgtagctgtctgcccaaactccttttggctcaccataaaaccttaccttactttatccggaacaagctctgcaaagttattgttgatattggacgtcaggattggcccatgttctaccacgacttttttactaacattttacagttgatccagtcccctgtgacaaccccccttgggctgatcatgttgaagacaacttcagaagagctggcttgtccccgtgaggacctcagtgtggctcggaaggaggagttgcggaagctgctactggaccaggtgcagacagtgcttgggctactgacaggtatcttggagactgtctgggacaaacacagtgttactgctgccactccaccaccatccccgacctcaggagaaagtggtgacttactgagtaacctgttgcagagtcccagttcagccaaactgttgaatcagccaattcccatccttgatgtggagagtgagtatatctgttccctggctttggagtgcctggcccatctcttcagttggattcctctgtctgccagcatcaccccatccctccttaccaccatcttccactttgcacgatttggctgtgacatccgggccagaaagatggcgtcagttaacggcagcagccagaactgtgtctcgggtcaggagcgcggccggctgggggtcctggccatgtcctgcatcaatgaactcatgtccaagaactgtgtgcctatggaatttgaggagtatttactgcgtatgttccagcagactttctacctcctgcagaaaatcaccaaggataacaatgcccacacagtgaagagcaggctagaagagctcgatgagagctatatcgagaagtttactgactttcttcggctctttgtgagtgttcacctaagaagaatcgagtcttactcccagttccctgtggtggagtttttgacacttttgttcaagtacacatttcatcagcctactcatgaaggttacttctcttgtttggatatctggacgctgtttttggactatctgacaagtaaaattaaaagtcgtcttggagacaaggaagcagttctcaacaggtacgaagatgccctggtgctcctgctcacagaggtgttgaatcgaatccagttcagatacaaccaagcccagctggaggagttggatgatgagactctggatgacgatcagcagacggagtggcagcggtacttacggcagagcttggaggtggtggccaaagtgatggagctcctgcccacgcacgccttctccacactgttccctgttcttcaggacaatttagaagtttatttgggattacaacagtttatagtcacttcagggtcaggacacaggttgaacatcacggcggagaacgactgccggcggctgcactgctccctgagagacttgagctccctgctgcaggccgtgggccgcctggccgagtactttatcggggatgtgtttgctgcacggttcaatgatgccctcacagtcgtggaaaggttggtcaaagtcactctgtacggatctcagataaaattgtacaacattgaaactgctgtgccatcagtattgaaacctgacctcattgatgtgcatgctcagtccctggctgcgctgcaggcttactctcactggttagcacagtattgcagtgaagttcaccggcagaacacgcagcagttcgtgacactcatctctactaccatggatgcaatcacacctctaatcagcaccaaggtccaagacaagctgctgctatctgcgtgccacttactggtctcactggccaccaccgtgcggcccgtctttctgatcagcatccctgcagtgcagaaagtattcaacagaatcactgatgcctctgccctgcgacttgtcgataaggcccaggtgttggtgtgccgagccctctctaacatcttgctgcttccgtggccaaaccttccagagaatgagcagcagtggcccgtgcgctccatcaaccacgccagcctcatctctgcactctcccgggactatcgcaacctgaagcccagtgctgttgccccacagagaaagatgccactggatgacaccaaactgattatccaccagacactcagcgtcttagaagatattgtggagaatatctcgggggagtccaccaagtctcgacagatttgctaccagtcgctgcaggaatctgttcaggtctccctggccctctttccagcttttatccatcagtcagatgtgactgatgagatgctgagcttcttcctcactctgtttcgaggccttagagtacagatgggtgtgcctttcactgagcaaatcatacagactttcctcaacatgtttaccagagagcagttagccgagagcatcctccacgagggcagcacaggctgccgggtggtggagaagtttctgaagatcctgcaggtggtggtccaggagccaggccaggtgttcaagcccttcctccccagcatcatcgccctgtgcatggagcaagtgtatcccatcattgccgagcgtccctcccctgatgtgaaggccgagctgtttgagctccttttccggacgctccatcacaactggaggtacttcttcaagtccaccgtgctggccagtgtccagagggggatcgctgaggagcagatggagaatgagccccagttcagtgccatcatgcaggctttcggacagtcctttctccagcccgacatccacctttttaaacaaaatctcttctacttggagactctcaacaccaagcagaagctgtaccacaagaagatcttccggactgccatgctgttccagtttgtgaacgtgctgctccaggtcctggtccacaagtcccatgatcttctgcaggaggagattggcatcgccatctacaacatggcctcagtcgactttgatggcttctttgccgccttcctcccagagttcctgaccagctgtgatggtgtggatgccaaccagaaaagtgtgctggggcggaatttcaagatggatcgggacctgccctcattcacccagaatgtgcacaggctggtcaacgacctgcgctactacagactctgcaacgacagcctgccccctggcactgtgaagctctaggcctgctactgcctggggacacggacttctgctgctgccacctgcgccagccctaccttccaccacagatgtctcccagatgggccttggtcacactccttggcttctcccaccgcaagcaacgctgcctgcctctgccgctcctccacatcttgccgctgcccagcagagctggcttctgggtccacctgagcactggacggtgctcccagggcgttggagcaggcggaggggtgtgtggccaggtactaggaggcaccaggaaatcccgcggggtggcccatgcagaccaggcgcacgtggctcatggggcagaattgccaaggacagctcacgacagtgccaccttctcaccattccagccaaggagagatgtgacgttggaactgctctggcacttctgtcaagcctcccccgccccaattgccttgagatctctgctctttgtcagagatttgcaaagactcacgtttttgttgttttctcatcattccattgtgatactaagaaactaagaagcttaatgaaaagaaataaaatgcctatgttgttgttctagaaa

SEQ ID NO: 8065 - protein, 1125 aa, Homo sapiens; identical to SEQ ID NO: 1110

SEQ ID NO: 8066 - DNA, 4559 bp, Homo sapiens
agcgggcggctccagggcgggcgcgcgcaaggatgctctagggggcggcggcagtggccgtgtgggttgaggctgcgaggacagcgcgggcccccgggcctctcccctgagccggccgcctgggccgcgcggtcgaggcctgtcagcctccgcccgttcagcctcggggccggggccgccgccacctctgcccgcggaggccggggagcccctgcctgggcccgcagcctcccccgcgggggtcgggcccgggcgggggtcccgagcagctgccctcctcgccggcatccgagcctcatttcctgctttttcagtttccttggggaggggcgggtgggtctggatgaattgtctcggggtcccccgatgaggcgacccgggcggccctgccctttttagagggtcccctcggggcccggtggggaaggggttgtctttgcatgggtgggggacttcccgagtctgccgggaccatgacctgaactgtgcgagcgggacgtgtccgaagcccaagaaccagctcatctgagccgccccctccccggccagcatgtgttctcaagcttcatccgtgtggtggcgtgtgtcagagcttccttccttttgaaagctgaattccattgcatctgaagaagcctctctcagggcattggaaagtctgatgacagaattttttcacgattgtacaaccaatgaaagaaaacgtgagatagaggagcttcttaataactttgcccagcaaataggagcctggagattctgcctgtactttctctccagcactaggaatgactatgtaatgatgtacagtttaacagtttttgagaatctgatcaataaaatgtggcttggggtcccatctcaggataagatggaaatccgtagctgtctgcccaaactccttttggctcaccataaaaccttaccttactttatccggaacaagctctgcaaagttattgttgatattggacgtcaggattggcccatgttctaccacgacttttttactaacattttacagttgatccagtcccctgtgacaaccccccttgggctgatcatgttgaagacaacttcagaagagctggcttgtccccgtgaggacctcagtgtggctcggaaggaggagttgcggaagctgctactggaccaggtgcagacagtgcttgggctactgacaggtatcttggagactgtctgggacaaacacagtgttactgctgccactccaccaccatccccgacctcaggagaaagtggtgacttactgagtaacctgttgcagagtcccagttcagccaaactgttgaatcagccaattcccatccttgatgtggagagtgagtatatctgttccctggctttggagtgcctggcccatctcttcagttggattcctctgtctgccagcatcaccccatccctccttaccaccatcttccactttgcacgatttggctgtgacatccgggccagaaagatggcgtcagttaacggcagcagccagaactgtgtctcgggtcaggagcgcggccggctgggggtcctggccatgtcctgcatcaatgaactcatgtccaagaactgtgtgcctatggaatttgaggagtatttactgcgtatgttccagcagactttctacctcctgcagaaaatcaccaaggataacaatgcccacacagtgaagagcaggctagaagagctcgatgagagctatatcgagaagtttactgactttcttcggctctttgtgagtgttcacctaagaagaatcgagtcttactcccagttccctgtggtggagtttttgacacttttgttcaagtacacatttcatcagcctactcatgaaggttacttctcttgtttggatatctggacgctgtttttggactatctgacaagtaaaattaaaagtcgtcttggagacaaggaagcagttctcaacaggtacgaagatgccctggtgctcctgctcacagaggtgttgaatcgaatccagttcagatacaaccaagcccagctggaggagttggatgatgagactctggatgacgatcagcagacggagtggcagcggtacttacggcagagcttggaggtggtggccaaagtgatggagctcctgcccacgcacgccttctccacactgttccctgttcttcaggacaatttagaagtttatttgggattacaacagtttatagtcacttcagggtcaggacacaggttgaacatcacggcggagaacgactgccggcggctgcactgctccctgagagacttgagctccctgctgcaggccgtgggccgcctggccgagtactttatcggggatgtgtttgctgcacggttcaatgatgccctcacagtcgtggaaaggttggtcaaagtcactctgtacggatctcagataaaattgtacaacattgaaactgctgtgccatcagtattgaaacctgacctcattgatgtgcatgctcagtccctggctgcgctgcaggcttactctcactggttagcacagtattgcagtgaagttcaccggcagaacacgcagcagttcgtgacactcatctctactaccatggatgcaatcacacctctaatcagcaccaaggtccaagacaagctgctgctatctgcgtgccacttactggtctcactggccaccaccgtgcggcccgtctttctgatcagcatccctgcagtgcagaaagtattcaacagaatcactgatgcctctgccctgcgacttgtcgataaggcccaggtgttggtgtgccgagccctctctaacatcttgctgcttccgtggccaaaccttccagagaatgagcagcagtggcccgtgcgctccatcaaccacgccagcctcatctctgcactctcccgggactatcgcaacctgaagcccagtgctgttgccccacagagaaagatgccactggatgacaccaaactgattatccaccagacactcagcgtcttagaagatattgtggagaatatctcgggggagtccaccaagtctcgacagatttgctaccagtcgctgcaggaatctgttcaggtctccctggccctctttccagcttttatccatcagtcagatgtgactgatgagatgctgagcttcttcctcactctgtttcgaggccttagagtacagatgggtgtgcctttcactgagcaaatcatacagactttcctcaacatgtttaccagagagcagttagccgagagcatcctccacgagggcagcacaggctgccgggtggtggagaagtttctgaagatcctgcaggtggtggtccaggagccaggccaggtgttcaagcccttcctccccagcatcatcgccctgtgcatggagcaagtgtatcccatcattgccgagcgtccctcccctgatgtgaaggccgagctgtttgagctccttttccggacgctccatcacaactggaggtacttcttcaagtccaccgtgctggccagtgtccagagggggatcgctgaggagcagatggagaatgagccccagttcagtgccatcatgcaggctttcggacagtcctttctccagcccgacatccacctttttaaacaaaatctcttctacttggagactctcaacaccaagcagaagctgtaccacaagaagatcttccggactgccatgctgttccagtttgtgaacgtgctgctccaggtcctggtccacaagtcccatgatcttctgcaggaggagattggcatcgccatctacaacatggcctcagtcgactttgatggcttctttgccgccttcctcccagagttcctgaccagctgtgatggtgtggatgccaaccagaaaagtgtgctggggcggaatttcaagatggatcgggacctgccctcattcacccagaatgtgcacaggctggtcaacgacctgcgctactacagactctgcaacgacagcctgccccctggcactgtgaagctctaggcctgctactgcctggggacacggacttctgctgctgccacctgcgccagccctaccttccaccacagatgtctcccagatgggccttggtcacactccttggcttctcccaccgcaagcaacgctgcctgcctctgccgctcctccacatcttgccgctgcccagcagagctggcttctgggtccacctgagcactggacggtgctcccagggcgttggagcaggcggaggggtgtgtggccaggtactaggaggcaccaggaaatcccgcggggtggcccatgcagaccaggcgcacgtggctcatggggcagaattgccaaggacagctcacgacagtgccaccttctcaccattccagccaaggagagatgtgacgttggaactgctctggcacttctgtcaagcctcccccgccccaattgccttgagatctctgctctttgtcagagatttgcaaagactcacgtttttgttgttttctcatcattccattgtgatactaagaaactaagaagcttaatgaaaagaaataaaatgcctatgttgttgttctagaaa

SEQ ID NO: 8067 - protein, 1111 aa, Homo sapiens; identical to SEQ ID NO: 8063

SEQ ID NO: 8068 - DNA, 1609 bp, Homo sapiens
tcctttctgcccttggacgccgccgaagaagcatcgttaaagtctctcttcaccctgccgtcatgtctaagtcagagtctcctaaagagcccgaacagctgaggaagctcttcattggagggttgagctttgaaacaactgatgagagcctgaggagccattttgagcaatggggaacgctcacggactgtgtggtaatgagagatccaaacacgaagcgctccaggggctttgggtttgtcacatatgccactgtggaggaggtggatgcagctatgaatgcaaggccacacaaggtggatggaagagttgtggaaccaaagagagctgtctccagagaagattctcaaagaccagatgcccacttaactgtgaaaaagatatttgttggtggcattaaagaagacactgaagaacatcacctaagagattattttgaacagtatggaaaaattgaagtgattgaaatcatgactgacagaggcagtggcaagaaaaggggctttgcctttgtaacctttgacgaccatgactccgtggataagattgtcattcagaaataccatactgtgaatggccacaactgtgaagttagaaaagccctgtcaaagcaagagatggctagtgcttcatccagccaaagaggtcgaagtggttctggaaactttggtggtggtcgtggaggtggtttcggtgggaatgacaacttcggtcgtggaggaaacttcagtggtcgtggtggctttggtggcagccgtggtggtggtggatatggtggcagtggggatggctataatggatttggtaatgatggaagcaattttggaggtggtggaagctacaatgattttggcaattacaacaatcagtcttcaaattttggacccatgaagggaggaaattttgaaggcagaagctctggcccccatggcggtggaggccaatactttgcaaaaccacgaaaccaaggtggctatggcggttccagcagcagcagtagctatggcagtggcagaagattttaattaggaaacaaagcttagcaggagaggagagccagagaagtgacagggaagctacaggttacaacagatttgtgaactcagccaagcacagtggtggcagggcctagctgctacaaagaagacatgttttagacaaatactcatgtgtataggcaaaaaactcgaggactgtatttgtgactaattgtataacaggttattttagtttctgttctgtggaaagtgtaaagcattccaacaaagggttttaatgtagattttttttttttgcaccccatgctgttgattgctaaatgtaatagtctgatcgtgacgctggataaatgtcttttttttttaaaaaaaaaaaaaagatctttgcagaacacctattaattaattaattaattcactcattcagcaacatttttgagctgctgccctgttttcatgatgtgctacatgatagatttgtaaacacctgtctcaataaacttatagttgtgttggaataggtattattctcagttgcatcttcatgaaactcataataaattggtaataattacaatgtaagaaggattctgaggccacagaaagaatga

SEQ ID NO: 8069 - protein, 320 aa, Homo sapiens
MSKSESPKEPEQLRKLFIGGLSFETTDESLRSHFEQWGTLTDCVVMRDPNTKRSRGFGFVTYATVEEVDAAMNARPHKVDGRVVEPKRAVSREDSQRPDAHLTVKKIFVGGIKEDTEEHHLRDYFEQYGKIEVIEIMTDRGSGKKRGFAFVTFDDHDSVDKIVIQKYHTVNGHNCEVRKALSKQEMASASSSQRGRSGSGNFGGGRGGGFGGNDNFGRGGNFSGRGGFGGSRGGGGYGGSGDGYNGFGNDGSNFGGGGSYNDFGNYNNQSSNFGPMKGGNFEGRSSGPHGGGGQYFAKPRNQGGYGGSSSSSSYGSGRRF

SEQ ID NO: 8070 - DNA, 500 bp, Homo sapiens
cctttctgcccttggacgccgccgaagaagcatcgttaaagtctctcttcaccctgccgtcatgtctaagtcagagtctcctaaagagcccgaacagctgaggaagctcttcattggagggttgagctttgaaacaactgatgagagcctgaggagccattttgagcaatggggaacgctcacggactgtgtggtaatgagagatccaaacacgaagcgctccaggggctttgggtttgtcacatatgccactgtggaggaggtggatgcagctatgaatgcaagacatgttttagacaaatactcatgtgtataggcaaaaaactcgaggactgtatttgtgactaattgtataacaggttattttagtttctgttctgtggaaagtgtaaagcattccaacaaagggttttaatgtagattttttttttttgcaccccatgctgttgattgctaaatgtaatagtctgatcgtgacgctggataaatgtctttttttt

SEQ ID NO: 8071 - protein, 84 aa, Homo sapiens
MSKSESPKEPEQLRKLFIGGLSFETTDESLRSHFEQWGTLTDCVVMRDPNTKRSRGFGFVTYATVEEVDAAMNARHVLDKYSCV

SEQ ID NO: 8072 - DNA, 846 bp, Homo sapiens
cctttctgcccttggacgccgccgaagaagcatcgttaaagtctctcttcaccctgccgtcatgtctaagtcagagtctcctaaagagcccgaacagctgaggaagctcttcattggagggttgagctttgaaacaactgatgagagcctgaggagccattttgagcaatggggaacgctcacggactgtgtggtaatgagagatccaaacacgaagcgctccaggggctttgggtttgtcacatatgccactgtggaggaggtggatgcagctatgaatgcaaggccacacaaggtggatggaagactacaatgattttggcaattacaacaatcagtcttcaaattttggacccatgaagggaggaaattttgaaggcagaagctctggcccccatggcggtggaggccaatactttgcaaaaccacgaaaccaaggtggctatggcggttccagcagcagcagtagctatggcagtggcagaagattttaattaggaaacaaagcttagcaggagaggagagccagagaagtgacagggaagctacaggttacaacagatttgtgaactcagccaagcacagtggtggcagggcctagctgctacaaagaagacatgttttagacaaatactcatgtgtataggcaaaaaactcgaggactgtatttgtgactaattgtataacaggttattttagtttctgttctgtggaaagtgtaaagcattccaacaaagggttttaatgtagattttttttttttgcaccccatgctgttgattgctaaatgtaatagtctgatcgtgacgctggataaatgtcttttttttttaaaaaaaaaaaaaa

SEQ ID NO: 8073 - protein, 84 aa, Homo sapiens
MSKSESPKEPEQLRKLFIGGLSFETTDESLRSHFEQWGTLTDCVVMRDPNTKRSRGFGFVTYATVEEVDAAMNARPHKVDGRLQ

SEQ ID NO: 8074 - DNA, 435 bp, Homo sapiens
atttgttggtggcattaaagaagacactgaagaacatcacctaagagattattttgaacagtatggaaaaattgaagtgattgaaatcatgactgacagaggcagtggcaagaaaaggggctttgcctttgtaacctttgacgaccatgactccgtggataagattgtcattcagaaataccatactgtgaatggccacaactgtgaagttagaaaagccctgtcaaagcaagagatggctagtgcttcatccagccaaagaggtcgaagtggttctggaaactttggtggtggtcgtggaggaaacttcagtggtcgtggtggctttggtggcagccgtggtggtggtggatatggtggcagtggggatggctataatggatttggtaatgatggaagcaattttggaggtggtggaagctacaatgattttgg

SEQ ID NO: 8075 - protein, 114 aa, Homo sapiens
MTDRGSGKKRGFAFVTFDDHDSVDKIVIQKYHTVNGHNCEVRKALSKQEMASASSSQRGRSGSGNFGGGRGGNFSGRGGFGGSRGGGGYGGSGDGYNGFGNDGSNFGGGGSYND

SEQ ID NO: 8076 - DNA, 4545 bp, Homo sapiens
gcgcatggctgccccggcggctgcctgaccgccgcccgccacctcggcggcctcgcaacccgtgggagcccgtggccatcgcagacctagaggacacgttgggcggcgcagtcgccgcggcaaggtcggcgggcggcgcggcgcgagggacggcgagcggggggcggcccggcccgggtcctcgcgggtcctcggcgggcccgggggagggccctctttgtggctgcagttggcaagatggcgccggtgggggtggagaagaagctgctgctaggtcccaacgggcccgcggtggcggccgccggcgacctgaccagtgaggaggaggaaggccagagcctatggtcctccattctgagcgaagtgtccacccgcgccaggtccaagctgccgtccggcaagaacatcctggtcttcggtgaagatggttctggtaaaacaaccctcatgactaaactacaaggagctgagcatggcaaaaaaggaagaggcctagaatatctctacctcagtgtccatgatgaggaccgagatgatcacacgcgctgcaacgtgtggattctggatggagacttgtaccacaaaggcctgctgaaatttgcagtttctgctgaatccttgccagagaccctcgtcatttttgttgcagacatgtctagaccttggactgtgatggaatctctgcagaaatgggctagtgttttacgtgagcacattgataaaatgaaaattccaccagaaaaaatgagggagctggaacggaagtttgtgaaagattttcaagactatatggaacctgaagaaggttgtcaaggttccccacagagaagaggccctctgacctcaggctccgatgaagaaaatgttgccctgcctctgggtgacaatgtgctgactcataacctggggatcccggtgttggtggtgtgcacaaagtgtgatgcggtgagtgtcctggagaaggagcacgattacagggatgagcatttggactttatccagtcacacctgcggaggttctgccttcagtatggagctgccttgatttacacatcagtgaaagaagagaaaaacctcgacttgttgtataagtatattgttcataaaacatacggtttccacttcaccacacctgccttagttgtggaaaaggatgccgtttttatacctgcaggctgggacaatgaaaagaaaatagctattttacatgaaaattttacaaccgtgaagccggaagatgcatatgaagactttattgtgaaacctcccgtgagaaagctggtccacgacaaagagttggcagcagaagatgagcaggtgttcctaatgaagcaacagtcactccttgccaagcaaccagccactcccacgagagcttctgaatctcctgcaagaggaccctctggctctccaaggacccagggtcggggagggccagccagtgtgcctagctcctccccaggcacgtcagtaaaaaagccggacccaaacatcaaaaataatgcagcaagtgaaggggtgttggccagcttcttcaacagtctgttgagtaaaaagacaggctctcctggaagtcctggtgctggtggggtgcagagcacagccaagaagtcaggacaaaagactgtgttgtcaaatgttcaggaagaactggatagaatgactcgaaagccagactctatggtaacaaactcttcaacagaaaatgaagcctgaacctccttaaaaagtgcatatgtcgaatgaccaaataactatgtatattgatctgctaagaccaggatttttctgatatggcacatgctatcagttttttggggcaggggagatgaactttaaaaaaaaaaaaaaaacttcattggcttgtccgagtgtgaaatgcacatttaggaaggttacatgtcagaccctttgttaaggataacccttggactctggggcatgtggctcttttgtgggaggcaagcacatctgggcttcttgtggaggggaaggtagagtgaaagaaagagggcccactttctaacagggtggagcaaatgagaccaagaaatcattggtaagatgatggttagtctgaccagtttcatgttagtaaattcacttgttcttgggaagcagattaagtagcagaaagtccaggaaagaaagaccagaaggagtaatgagacaagtgatggtggggaagctgaatgttgagggaggtggaggaaggaggagatgagcagtgtcagtaaatactgtgcattcagtagaagttgaagaatcattgttagaagcatttccaaacaaaacactaagcaaaatgggaattaggcttattttgaatgcatctttaacttacgaaagatgtactaattgtgggggtgcctgagtcaggcggagctgacccaggggtgggaacgatggcagctgcccaggacccatgtgcttggcccaggctatgtcctcgtgagaggtactggggtccacggatatgtgttgtggggcagacagtcactgtgggatgtcttcaaagtcagcagttacagaattagtttactttgaattttgttgtctaaatagctcctgctttattttttaaattaaattttttgtttttactatcacaggctggcctaactaatacaaaataggtgatgaacctctggttttaccataatgcaatgtgccacggaaagtttgggggaggtttttaatgtaattgcactctggttaattggctcgtaccaagccctgccttatgacttgtggaaagcttcaaggagttccactgatgcaaaagggtcttttcctagcttcctggtctgatcagtgctatgagatggacagataagtgtgaatgttttatacagaaaatggaaatgatacatttctcttgttaggtgttttcataaaatgtagcattttttttcttatggaaataagagtttcaggtgtctccccacctagggcaaattcatgcacattgtcatgttataccaccattctggaaatgatttctgtggatttgaaattgcacttttaattttatatatgacagcatttaaatgcaaacactaccatgaatttaatgtataaaatgttgtcaaaccaagggaaaaaaccacagttcaccatgtggagtttactttttttatatgaatgtttgttgtactgtgtctaagcataacttccctaatgtcattacttttacataccagatttgactgaccactaatgtagtactggggataacttaatatcctatgttgtgtcaagactctttgaagactttcttgaattgctttcgtaaaggtctgaacactgttaaggagaaagctgagtatcaacttgcctttctgatagaaatgtttcttgtgccagttttattgttgagatatactatttttttccttttttaattcagttttttaaaaaaacaaatgtattgtggcttccagttaccaggttgtctaggtaatgacagtaaactgactgtagaatgataattgtggtatagtgaccaatagatgccaaacagcttgtggcctcactaaaggtggggtcgcttagtccccgggagtaaaatgagtgacctcagaaacaagaattcctggaaaggcacatgccgaagaggaatatggtataattttaaattttaatgcaaaattttaatttgtctttattttttatcatttgaactgataagcactttttgtgtcaatataaaatatactaaaactgatgaaatgctaagacatgtcttgtgaaggaaggtttcttggagaccacttttatttactcatgagaagtggaagctcctagtatcagaagaagctgatacatagtgtcatgtgctcagtggttgccaaagtctaccaactttggggagctgcagggttctttttgggaggtgggaggaagggagatgagttttgttattttggggttttcaagcattggaaccaaaggccaaataataaacagcctttagtttttaaagtaaaattcattttatttgcagagtacacttgtatggtagactgttaaagacaattttatgactatttatgcacattataatggttacatctgctttttgtctttaaaataaaaaaaaaaatcagagaaaagcccacctttgaatacgtggctgaagataacagccaagaattggtctttcctaaaaatgcaacagataatgctgctagattgttattttgtttgcacttttttttgattggcattttaaaatcggtatttaaactgaagacattgtcatgttttattaatttaacaaagttgaaagtgactgctctgtacatcatgaccttaacaatgttaatgctgtaagtgaaagttcactgtcgtctgtatactaaatttattggtgtttctaacttaaaagtaagactgcagattatcccccaccagccttagtccaggggtgtggctctgtccgggtgcagtatgcagtcatgtggaaccttgctttctagtcctgggaaaaaaagatgtctctaattactggcttcaataaacacgaatccagactgcttacaa

SEQ ID NO: 8077 - protein, 492 aa, Homo sapiens; identical to SEQ ID NO: 1112

SEQ ID NO: 8078 - DNA, 3349 bp, Homo sapiens
gcgcatggctgccccggcggctgcctgaccgccgcccgccacctcggcggcctcgcaacccgtgggagcccgtggccatcgcagacctagaggacacgttgggcggcgcagtcgccgcggcaaggtcggcgggcggcgcggcgcgagggacggcgagcggggggcggcccggcccgggtcctcgcgggtcctcggcgggcccgggggagggccctctttgtggctgcagttggcaagatggcgccggtgggggtggagaagaagctgctgctaggtcccaacgggcccgcggtggcggccgccggcgacctgaccagtgaggaggaggaaggccagagcctatggtcctccattctgagcgaagtgtccacccgcgccaggtccaagctgccgtccggcaagaacatcctggtcttcggtgaagatggttctggtaaaacaaccctcatgactaaactacaaggagctgagcatggcaaaaaaggaagaggcctagaatatctctacctcagtgtccatgatgaggaccgagatgatcacacgcgctgcaacgtgtggattctggatggagacttgtaccacaaaggcctgctgaaatttgcagtttctgctgaatccttgccagagaccctcgtcatttttgttgcagacatgtctagaccttggactgtgatggaatctctgcagaaatgggctagtgttttacgtgagcacattgataaaatgaaaattccaccagaaaaaatgagggagctggaacggaagtttgtgaaagattttcaagactatatggaacctgaagaaggttgtcaaggttccccactttctaacagggtggagcaaatgagaccaagaaatcattggtaagatgatggttagtctgaccagtttcatgttagtaaattcacttgttcttgggaagcagattaagtagcagaaagtccaggaaagaaagaccagaaggagtaatgagacaagtgatggtggggaagctgaatgttgagggaggtggaggaaggaggagatgagcagtgtcagtaaatactgtgcattcagtagaagttgaagaatcattgttagaagcatttccaaacaaaacactaagcaaaatgggaattaggcttattttgaatgcatctttaacttacgaaagatgtactaattgtgggggtgcctgagtcaggcggagctgacccaggggtgggaacgatggcagctgcccaggacccatgtgcttggcccaggctatgtcctcgtgagaggtactggggtccacggatatgtgttgtggggcagacagtcactgtgggatgtcttcaaagtcagcagttacagaattagtttactttgaattttgttgtctaaatagctcctgctttattttttaaattaaattttttgtttttactatcacaggctggcctaactaatacaaaataggtgatgaacctctggttttaccataatgcaatgtgccacggaaagtttgggggaggtttttaatgtaattgcactctggttaattggctcgtaccaagccctgccttatgacttgtggaaagcttcaaggagttccactgatgcaaaagggtcttttcctagcttcctggtctgatcagtgctatgagatggacagataagtgtgaatgttttatacagaaaatggaaatgatacatttctcttgttaggtgttttcataaaatgtagcattttttttcttatggaaataagagtttcaggtgtctccccacctagggcaaattcatgcacattgtcatgttataccaccattctggaaatgatttctgtggatttgaaattgcacttttaattttatatatgacagcatttaaatgcaaacactaccatgaatttaatgtataaaatgttgtcaaaccaagggaaaaaaccacagttcaccatgtggagtttactttttttatatgaatgtttgttgtactgtgtctaagcataacttccctaatgtcattacttttacataccagatttgactgaccactaatgtagtactggggataacttaatatcctatgttgtgtcaagactctttgaagactttcttgaattgctttcgtaaaggtctgaacactgttaaggagaaagctgagtatcaacttgcctttctgatagaaatgtttcttgtgccagttttattgttgagatatactatttttttccttttttaattcagttttttaaaaaaacaaatgtattgtggcttccagttaccaggttgtctaggtaatgacagtaaactgactgtagaatgataattgtggtatagtgaccaatagatgccaaacagcttgtggcctcactaaaggtggggtcgcttagtccccgggagtaaaatgagtgacctcagaaacaagaattcctggaaaggcacatgccgaagaggaatatggtataattttaaattttaatgcaaaattttaatttgtctttattttttatcatttgaactgataagcactttttgtgtcaatataaaatatactaaaactgatgaaatgctaagacatgtcttgtgaaggaaggtttcttggagaccacttttatttactcatgagaagtggaagctcctagtatcagaagaagctgatacatagtgtcatgtgctcagtggttgccaaagtctaccaactttggggagctgcagggttctttttgggaggtgggaggaagggagatgagttttgttattttggggttttcaagcattggaaccaaaggccaaataataaacagcctttagtttttaaagtaaaattcattttatttgcagagtacacttgtatggtagactgttaaagacaattttatgactatttatgcacattataatggttacatctgctttttgtctttaaaataaaaaaaaaaatcagagaaaagcccacctttgaatacgtggctgaagataacagccaagaattggtctttcctaaaaatgcaacagataatgctgctagattgttattttgtttgcacttttttttgattggcattttaaaatcggtatttaaactgaagacattgtcatgttttattaatttaacaaagttgaaagtgactgctctgtacatcatgaccttaacaatgttaatgctgtaagtgaaagttcactgtcgtctgtatactaaatttattggtgtttctaacttaaaagtaagactgcagattatcccccaccagccttagtccaggggtgtggctctgtccgggtgcagtatgcagtcatgtggaaccttgctttctagtcctgggaaaaaaagatgtctctaattactggcttcaataaacacgaatccagactgcttacaa

SEQ ID NO: 8079 - protein, 209 aa, Homo sapiens
MAPVGVEKKLLLGPNGPAVAAAGDLTSEEEEGQSLWSSILSEVSTRARSKLPSGKNILVFGEDGSGKTTLMTKLQGAEHGKKGRGLEYLYLSVHDEDRDDHTRCNVWILDGDLYHKGLLKFAVSAESLPETLVIFVADMSRPWTVMESLQKWASVLREHIDKMKIPPEKMRELERKFVKDFQDYMEPEEGCQGSPLSNRVEQMRPRNHW

SEQ ID NO: 8080 - DNA, 1494 bp, Homo sapiens
gcgcatggctgccccggcggctgcctgaccgccgcccgccacctcggcggcctcgcaacccgtgggagcccgtggccatcgcagacctagaggacacgttgggcggcgcagtcgccgcggcaaggtcggcgggcggcgcggcgcgagggacggcgagcggggggcggcccggcccgggtcctcgcgggtcctcggcgggcccgggggagggccctctttgtggctgcagttggcaagatggcgccggtgggggtggagaagaagctgctgctaggtcccaacgggcccgcggtggcggccgccggcgacctgaccagtgaggaggaggaaggccagagcctatggtcctccattctgagcgaagtgtccacccgcgccaggtccaagctgccgtccggcaagaacatcctggtcttcggtgaagatggttctggtaaaacaaccctcatgactaaactacaaggagctgagcatggcaaaaaaggaagaggcctagaatatctctacctcagtgtccatgatgaggaccgagatgatcacacgcgctgcaacgtgtggattctggatggagacttgtaccacaaaggcctgctgaaatttgcagtttctgctgaatccttgccagagaccctcgtcatttttgttgcagacatgtctagaccttggactgtgatggaatctctgcagaaatgggctagtgttttacgtgagcacattgataaaatgaaaattccaccagaaaaaatgagggagctggaacggaagtttgtgaaagattttcaagactatatggaacctgaagaaggttgtcaaggttccccacagagaagaggccctctgacctcaggctccgatgaagaaaatgttgccctgcctctgggtgacaatgtgctgactcataacctggggatcccggtgttggtggtgtgcacaaagtgtgatgcggtgagtgtcctggagaaggagcacgattacagggatgagcatttggactttatccagtcacacctgcggaggttctgccttcagtatggagctgccttgatttacacatcagtgaaagaagagaaaaacctcgacttgttgtataagtatattgttcataaaacatacggtttccacttcaccacacctgccttagttgtggaaaaggatgccgtttttatacctgcaggctgggacaatgaaaagaaaatagctattttacatgaaaattttacaaccgtgaagccggaagatgcatatgaagactttattgtgaaacctcccgtgagaaagctggtccacgacaaagagttggcagcagaagatgagcaggtgttcctaatgaagcaacagtcactccttgccaagcaaccagccactcccacgagagcttctgaatctcctgcaagaggaccctctggctctccaaggacccagggtcggggagggccagccagtgtgcctagctcctccccaggcacgtcagtaaaaaagccggacccaaacatc

SEQ ID NO: 8081 - protein, 418 aa, Homo sapiens
MAPVGVEKKLLLGPNGPAVAAAGDLTSEEEEGQSLWSSILSEVSTRARSKLPSGKNILVFGEDGSGKTTLMTKLQGAEHGKKGRGLEYLYLSVHDEDRDDHTRCNVWILDGDLYHKGLLKFAVSAESLPETLVIFVADMSRPWTVMESLQKWASVLREHIDKMKIPPEKMRELERKFVKDFQDYMEPEEGCQGSPQRRGPLTSGSDEENVALPLGDNVLTHNLGIPVLVVCTKCDAVSVLEKEHDYRDEHLDFIQSHLRRFCLQYGAALIYTSVKEEKNLDLLYKYIVHKTYGFHFTTPALVVEKDAVFIPAGWDNEKKIAILHENFTTVKPEDAYEDFIVKPPVRKLVHDKELAAEDEQVFLMKQQSLLAKQPATPTRASESPARGPSGSPRTQGRGGPASVPSSSPGTSVKKPDPN

SEQ ID NO: 8082 - DNA, 532 bp, Homo sapiens
tggcacaggtaaaaaacagcagaaaagtttacagtgcacgaggtaatggggtggaggttcgtggagccagctgtctgaacttcctgcctccaccttccaaccgtagcttagcttacctgtgagcccttccaggctctgtgcttctcactgtctgggaagccctagttgagtgcctcacgagatcttcgggcattagatcttgcccagttaagccattgtatattttattgatttgaagatttgttaaaagtgcttttaaagagaaaaatgtgagaatatttgattcctttaaagacccttcaacaaccacatggaggagttcttctctgtttttatccaaaatggagtatggtttacttgactagattatttgtattaacagtgaagtatttgtgtgtgtgtgtgtgtgtgtgtgtgtgtgtgtgtgtgtgtgtgtgtgtgtttgtttttttttgaaacagagtctcactgtcacccagccgagattgtgccactgcactccagcctcggcaacagagcgaaactccatcac

SEQ ID NO: 8083 - protein, 35 aa, Homo sapiens
MVYLTRLFVLTVKYLCVCVCVCVCVCVCVCVFVFF

SEQ ID NO: 8084 - DNA, 2899 bp, Homo sapiens
atggccacgggctcccacgggttgcgaggccgccgaggtggcgggcggcggtcaggcagccgccggggcagccatgcgcggggaggcggtggcaggggcgggcaccgtccggaccgagggcgcgctggcggcctctgccggctgaggggcgcagcgcagcaccccgccacgctcgccgattcccctgcgccgtcgcgggtcgggcagccggatgaccgacccgaaagcctaggctttgggaatgagactgatggacacaaaagcgccatttatctagagctcaccatgtgccagagtcacacattatctcactgaatcttatctaaccctttcacagatgaggaacctgaagctcaaaaaatttaagaaacccacccaaggacccaaggctagaagataacattcggtacttctaatttattccccaaccttggaccattatatcatgaacttggcctaaccctactcaagccctgcattgaaagactagccttaaggaagaccccagaatcctcataaatatcctgcatttccccctcctcctccgaagactaaagactgtgaagtagtgctcttgaccgcagtgcataatacacttggctttgctttattaacatgctttttaaaatgatgttttcagggagccagcatttcacaccagaagaggagcccttaatttccttgggggccagctggcaggtgcagagcggggagaaaaataaaaggaaaggggatggaaaagggaaagagcggagagtaaccgaaggaaaaacatacattccattatcaagcttaattttaggtgtggcctctacttgagggctcttgccattctctatggaaacaggctaacaagacatttctaaatatcacaaggaagtggaatgtggcagaaaagcaccacctaagtaggtttcagatgagtaggattgtgatcctgatgccaaaaaatctggcggcatgaattacgggataaaacaaatgggcatatcatctgccaaactggatgtaaggtttaaacaagacgagagtgaaaacccactgagttcctcccttggaaatctgggaaaatcaggcaaagtgccagaagtcctaaaagggcaagcagtgctgaattttcacaggacagaagatggagatgaaaattacaggagtaccaggtaggcggatgctgcagatacagcaaatgcagatttcaacagggcatttgacaattcacatcttagatgcgaaagtgaaatcaatgctggatgatagcactgaggcttattaaagactagcccagaggtggctgatgaagaggagggaccagcagatgaggctgctaggggcctgcccaaacctcctgccctggccagccaattcagggtgccatcagtgacttggataagaatacagcagcagtcatggaagttgtggatgacctgaagcaggaagggttgccttatctactgcatgacaaactgagcagagactaaatctaacaagttgaaatttagcaggaactattaaagtcctgtggaagagtttaacaaaaaagcataggaaggccaggtacggtggctcacacctgtaatcccggcactttgggaggccgaggctggcggatcacttgaggtcaggagttccagaccagcctgtccaacatggccaaaccccgtctctactaaaaatacaaaaaaaaaaaaaaaaaattagccaggaatggtggcatccgcctgtaatcccagctgcctgggaggctgaagcacgataattgcttgaacccaggagacagaggctgcagggagttgagatcacaccactgcactctagcctgggcgacagagtaagactgtcaaataaagtaaaatttaatttaaaaatgcataggaataggataggaaattatttgaaataaaaatgataatctaaacgtcattactgtattaactataatctaagagttggtcatgtagaatgccaagaaacatcttagggtagaacccataaaacctcactgatgctaacaaagaagctagccccccatgccagtcaggctggatttcttagggtgacatttctggacacattttgcaaagacagaggtatccagtggtcagtgactaaactcataaggggacaagacatcgttctgctgcaacatgaagtaactagggctcatcagtatgaaggataaagatacagagggagaagaagggaaagtgtagacatttctgaaaagctaaagcaaataaacatacaccaaaaagaagtgaacctgactatatgatgtgggagtattcaaagcaactgcataattagtctttagaagaagaaactttttttttttcctctaggatactacaataaacaatagaagaggaaacttttttaagagatagggtcttgctcttgtccaggccagagtacagtgaaacactcataactaactacaacctcgaactcctgggctcaagcgatcctcccacttcagcctctcaagtagttaggaccacaggggcatgccaccacatccagctaatttttaaatttttttgtaaagataggggtctcactatgttgcccaggctggtctcaaactccttgcctcaagtgatcctcccacattggcctcccaaagtgctaggattacaaatatgggccaccaccacagccaaggaaacattttaattaacaaaatgtcaaatattgatttagtgtatgggaaccttagttaaatagcttggggaactattctttctgaattctggggagggacttttgtaccatataaaaatactaaaatccaaatgtcccacatagtatttattgcaatataatgtcaaataacatttaaaggctaattcttttctctgtgtcctttaagcttaaggaaaaataaaagcatattcctaaa

SEQ ID NO: 8085 - protein, 67 aa, Homo sapiens
MNYGIKQMGISSAKLDVRFKQDESENPLSSSLGNLGKSGKVPEVLKGQAVLNFHRTEDGDENYRSTR

SEQ ID NO: 8086 - DNA, 2628 bp, Homo sapiens
gacgtgagcctggtcggctgggcgggaaaccctgtcgtgcgtcgtggcaggtgagcggtgatgaagaaagggcggaagctcccgcttgagggtagacgccacggcctccgctcccgcgcgttgttgtcctgccttaccgcgcttggaaactctgacttgcgagccctggtcagagaggagcctggaggggccacctaagctctgcacaaggaattcatccaactctgtagacaaaatataaggaaaaagaatatagacaagcatggaaagtgaagacacaaagaaaacacaagaaatgaagactgacctgaacttattattggagtgtctaaagtatcaaatggacaatgctttttcacaaaaggaagctttggtcactattcattcaatttgtcaacaaaacagtaatgcaagtgtttattttcgggaaattggtggtttgatgtttgtaaaaaatcttgcaaagtcaagtgaacatagcatggtaaaagaagcagccttatatacattaggagctattgcagagaaaaatgtttactgtcagcagactttgtgtacttcagagttgtttgaagacttaacttggttcttatctaatgattcaaacataaatttgaaaagaatgtctgtttatgttattttggttctggtttcaaataataggaccggacaaacacttgtgagagaaacaggttgtattacagttctgtcacggttattcaggacagttatttcaaaacatgagttggatttgtcagataaaaatgttttccagagttatcagttgtggtcttcagtgtgtagtactctgtgtgtctgtgtcaacaatcctcaaaatgatgagaatcaaatgttttgctgttccctttttccacatgctaatgaatggctaaaaaattgcacgacacctgagataattcgccctatttgctcatttattggactcactcttgcaaataacacatatgttcagaaatacttcgtatctgtgggcggactggatgtattgtctcaagttctcatgcagctggaatctgattcacatgagactctttccagtgctaaacttgcagtggttgtgacgaagactgtggatgcatgcattgctgataatcctacttttgggatagtactctccaagtaccacattgtttctaaacttctggcattactgcttcatgaaagtctggattcaggagaaaaatttagcatcatgcttactcttggtcattgcacagaggattgtgctgagaaattatctctaagtctaggagaatatccttttgatgaaaatgaaacacagcaattaaaggacataagtgtgaaggagaataatcttgaagagcactggaggaaagcaaaggaaattctacacagaatagaacagcttgaaagagaaggaaatgaggaagaaatacaaagagaaaactatcaggataatatttcatctatgaacataagtattcagaatacatggaaacatctccatgcagatcggattggtcgaggtagcaaagcagaagatgaggataaaagccattctagacagttacagagttataagtcccatggagtcatgtctaaagcatgtacaaatgatgaccaaatgaagacaccgttaaagagcgcaaatccagtccatgcttgttacagggagagtgagcaaaataagactttatataaagccaagtcaagctgcaatcaaaacttacatgaagaaactacttttgaaaagaattttgtttctcaatcaagatccatttacattatgttcagatataataaataaagaagtagtcagttttctagcaactcccagttgttccgaaatgttgacgtataggtgctcaggttgcatagcagtagaaaaatccctgaatagccgaaactttagcaagctcttgcactcttgcccataccaatgtgatcgtcacaaagtcattgtggaagctgaagacagatataaaagtgaactaaggaaatcacttatctgtaacaaaaaaattctgctgaccccacgtagaagacaacgactcagtaatgaatctactacccctggaggaataagtgaatatatttaatttttaaatgaacttaaatttcatatatttctgagaaagaacagctgagtggttgttctcagtcttattattaatggatcttaaatgataaaccttgcctctgatgagggtcagaccttctaataaaagagactttcctcttcccttcatgttgcttgctcactcactgcctgccagcaggggaaggagcaggaggaaactaacatttattaagcacctgctaggtgttaggtgttgtatagatattatttcctttaattcctatagcaatattgtaagttagatattaatttgctcctattgtaaggcataattattaatacttggtaagtggcagaacttagattcaaaaagccattctccagaagcccttgttctatcctcacatttctattttaagaacaaaattattatgcacaagtgcttcagagagactttgcaggtttttgttcataactatagtgcttgaaacaataaaaattgaagagacaaatagtataaactttaaaactctgcttaagaaataaaaatgcctcttaaacaatta

SEQ ID NO: 8087 - protein, 508 aa, Homo sapiens
MESEDTKKTQEMKTDLNLLLECLKYQMDNAFSQKEALVTIHSICQQNSNASVYFREIGGLMFVKNLAKSSEHSMVKEAALYTLGAIAEKNVYCQQTLCTSELFEDLTWFLSNDSNINLKRMSVYVILVLVSNNRTGQTLVRETGCITVLSRLFRTVISKHELDLSDKNVFQSYQLWSSVCSTLCVCVNNPQNDENQMFCCSLFPHANEWLKNCTTPEIIRPICSFIGLTLANNTYVQKYFVSVGGLDVLSQVLMQLESDSHETLSSAKLAVVVTKTVDACIADNPTFGIVLSKYHIVSKLLALLLHESLDSGEKFSIMLTLGHCTEDCAEKLSLSLGEYPFDENETQQLKDISVKENNLEEHWRKAKEILHRIEQLEREGNEEEIQRENYQDNISSMNISIQNTWKHLHADRIGRGSKAEDEDKSHSRQLQSYKSHGVMSKACTNDDQMKTPLKSANPVHACYRESEQNKTLYKAKSSCNQNLHEETTFEKNFVSQSRSIYIMFRYNK

SEQ ID NO: 8088 - DNA, 1833 bp, Homo sapiens
agcggcgaaggggcgctcagtgcgcctgcgcgcttgtggagctggtggcggcgctccgcaggggctcggctgttttccgcgcggcaggcgcggccatggcgcagctgggaaagctgctcaaggagcagaagtacgaccggcagctgaggttgtggggtgatcatgggcaagaggctttagaatctgctcatgtttgcctaataaatgcaacagccacaggaactgaaattcttaaaaacttggtactaccaggtattggttcgtttacaattattgatggaaatcaggtcagcggagaagatgctggaaacaatttcttccttcaaagaagcagtatcggcaagaaccgagctgaagctgccatggaattcttacaagaattaaatagcgatgtctctggaagttttgtggaagagagtccagaaaaccttctagacaatgatccctcatttttctgtaggtttactgttgtagttgcaactcagcttcctgaaagcacttcactacgcttagcagatgtcctctggaattcccagattcctcttttgatctgtaggacatatggactagttggttatatgaggatcattataaaagaacatccagtaatagaatctcatccagataatgcattagaggatctacgactagataagccatttcctgaactgagagaacattttcagtcctatgatttggatcatatggaaaaaaaggaccacagtcatactccatggattgtgatcatagctaaatatttagcacagtggtatagtgaaacaaatggacgaatacctaaaacgtataaagaaaaagaggacttcagagatttgattagacaaggaattctaaaaaatgaaaatggggctccagaagatgaagagaattttgaagaagctattaaaaatgtgaacacagcactaaatacaactcagatcccaagcagtattgaagatatatttaatgatgatcgctgcataaatatcaccaaacagactccatcattttggattttagctcgtgccttaaaggaatttgtggccaaagagggtcaaggaaatttacctgttcgaggcacaattcctgatatgattgcagattcaggcaaatatataaaactgcaaaacgtttaccgtgaaaaagcaaagaaagatgctgccgctgtgggtaatcatgttgccaaattgctgcagtccattggccaggcaccagagtccatttcagagaaagaattaaaattactctgcagcaattctgcatttcttcgagtggtaagatgtcgatccttagctgaagaatatggtttggatacaattaacaaggatgaaattatttctagcatggacaatccagataatgaaatagtgttgtacttaatgttacgggctgttgatagatttcataaacaacagggtagatatccaggagtatctaactatcaagttgaagaagatataggaaagttgaagtcttgtctcactggcttccttcaggaatatggtttatctgtaatggtgaaagatgattatgtccacgaattttgccgatatggagctgctgagccacataccattgctgcattcttggggggagctgctgctcaagaggtcatcaaaataatcaccaaacaatttgtaatttttaataatacttacatttacagtggcatgtcacaaacttcagcaactttccagttgtagagtaagcaagcaccttaagtagtgtgttaatgattgaaactgtaattgccttcgggttgtgctttagtctgtaaaattctaaaggagagctgctaaattgttttcttaataaacatttttctcatttgtaata

SEQ ID NO: 8089 - protein, 534 aa, Homo sapiens; identical to SEQ ID NO: 1118

SEQ ID NO: 8090 - DNA, 785 bp, Homo sapiens
tcattaagttcttctatcaaataattattaagcactatgtgccagatgcttttctagacagtgaatatgatgcaattaataaagatttaattaaattcaaatttttactaggttttagttggtctctgattataggtttgtgatatgtgcaaatattggtctcatactttgttatttttgttcttcagtttcatacatattttgactagaacatctgaaactagattaaataaaggagttggccattaattttgaatcacatttattttaatgaaaactaacttttatttttaggagtatctaactatcaagttgaagaagatataggaaagttgaagtcttgtctcactggcttccttcaggaatatggtttatctgtaatggtgaaagatgattatgtccacgaattgtgagtattttttagggtatctaggagatgattccacacctgtcataaggctaatcaaaattcatgtctctgtggtctcctttagttgccgatatggagctgctgagccacataccattgctgcattcttggggggagctgctgctcaagaggtcatcaaaataatcaccaaacaatttgtaatttttaataatacttacatttacagtggcatgtcacaaacttcagcaactttccagttgtagagtaagcaagcaccttaagtagtgtgttaatgattgaaactgtaattgccttcgggttgtgctttagtctgtaaaattctaaaggagagctgctaaattgttttcttaataaacatttttctcatttgtaa

SEQ ID NO: 8091 - protein, 87 aa, Homo sapiens [sequence omitted]

SEQ ID NO: 8092 - DNA, 1054 bp, Homo sapiens
caagtatatagtaaattcagcccttcattgtttgttacattgcaaattaaccaaattaaactgaaattttttttcctttcagtttctagcatggacaatccagataatgaaatagtgttgtacttaatgttacgggctgttgatagatttcataaacaacagggtagatatccaggagtatctaactatcaagttgaagaagatataggaaagttgaagtcttgtctcactggcttccttcaggaatatggtttatctgtaatggtgaaagatgattatgtccacgaattgtgagtattttttagggtatctaggagatgattccacacctgtcataaggctaatcaaaattcatgtctctgtggtctcctttagttgccgatatggagctgctgagccacataccattgctgcattcttggggggtgagttccatatatgagaagactcacctgttgttacatagtacagttactattttaatacaaagttttgtcgtctagctattttaattagggaggtcagtgaagcaggatgttatatttctttcttttttttttttttgagacgcagtctcactgttttgcccaggttggagtgtattgatgccatcatagctcgctgcaacctcaaactcctgggctcaagtgatctctcgcctccgcctcctgaatagctgggactacaggcatgtgccagtaagcctggctaatttttcaattttttgtagagacagggtcccactatgttgctcaggttaggatatttattcagttgcccctatactggtctccctgccttccatctctcccactgccatccaacttaaactccttaagagtcattaatccttctaaagcatagctctgattgtgtccttttactaaccctctgccccaccaatatacataacactctacaacagtcctccaagcaagtccaaggactttggcttgacgttaaaaaaccctgtgttttggttccactcggcctttccagccttggttttatcatattacttgctttccccccaggatgccctttgatttcctgc

SEQ ID NO: 8093 - protein, 67 aa, Homo sapiens
MDNPDNEIVLYLMLRAVDRFHKQQGRYPGVSNYQVEEDIGKLKSCLTGFLQEYGLSVMVKDDYVHEL

SEQ ID NO: 8094 - DNA, 732 bp, Homo sapiens
gtgatcatagctaaatatttagcacagtggtatagtgaagtatgtccttttttaaaaaaaatttcatatgcaactgtattttcagtttcttacaaaggatttccttgatggggaatgggagattaattttttttccttatggagttgtatggtagggcaaatggatgcttttaaatttaaatctagcagttcctcttttgatcctgataattttaattaaaatgaaattcaataaatgtcattatgaaactggcagggggaatgaatgtagataaatggtcacagtgtaatgtctgtttaggctcggttttaatgttttctgccactactaatcttgcaccttgtttgttctattagactaatcttgaattagcgtttgttgtattagattatataatactagatcacaagtttgatgctgggtatttgaacatttattattctgttctactttggggcgtttttgaaaatttcaataatacaaagcttaaagtcattacatatatcaagagtacaattcataaacctctctcctttaggactacttatccataataatgatgaaaactattatttttagagccatatcaggcattgtgctagagatgcactttatacagatgtcacatttaatctgtagaacaattctcaaaggtaaacagtatcatccccattttacacttgaaaactgaggttcagagaggccatcaccttacttgcttctgaactggt

SEQ ID NO: 8095 - protein, 37 aa, Homo sapiens
MKLAGGMNVDKWSQCNVCLGSVLMFSATTNLAPCLFY

SEQ ID NO: 8096 - DNA, 547 bp, Homo sapiens
tgtttgcctaataaatgcaacagccacaggaactgaaattcttaaaaacttggtactaccaggtattggttcgtttacaattattgatggaaatcaggtcagcggagaagatgctggaaacaagtatgttctattctcttcaaatatattcacgttaaggaaggcaaggcctgagtcttagcttcacctcctcagtcagggtgactcgactctcagtggaaatcatccttatgtttgggattatggtgaggaagtgagataatataggtaaagtgctagtacagcatctggcaaatagggcattaataaatgttacccatcattactgtctttattgttattaatacaaaggagtagtcgttattcctttattcatggaatatgggcacttcctaagctcttgtattgatccgtaggtgttagcatataattaacaataatgcctgttgtttgtgatgtcttttaggcttagtctaggggtatctctctttacagtgtcaacaaaaatgctgttttaaagatggcctgtatattattctttaaagat

SEQ ID NO: 8097 - protein, 47 aa, Homo sapiens
MQQPQELKFLKTWYYQVLVRLQLLMEIRSAEKMLETSMFYSLQIYSR

SEQ ID NO: 8098 - DNA, 434 bp, Homo sapiens
gccggaagttgttcaccatgtggatcctctcatcgtcctccgagatgagaaaagcaaagctcaagagaggatgagtgatgggctcgaagatgcacagtgagtgactgaacaaagatgaaaacccagggctgctgggtccctcgttcaatattgtccaaaatcactggaaagggaggaagcggattttaaatttgactctcatttgtgtgtgtatgcaagtcctctctaaaaggacttaggagaagctagggagagtgtttacctacagggaggagactggacaccggaaggttgtggaaggttgtggaagggtgtggtatggcgtgggaaggacactctttactggtactcctttgtatctcttgaatgaattaaggcatgtattacctctttaacaaccaaataaaagttgatccagttctttccttcctgca

SEQ ID NO: 8099 - protein, 51 aa, Homo sapiens
EKLGRVFTYREETGHRKVVEGCGRVWYGVGRTLFTGTPLYLLNELRHVLPL

SEQ ID NO: 8100 - DNA, 1554 bp, Homo sapiens
ccgctgctttaagaggctgctccgcggtagcgagcggggccggagccgcagcccgaacgagcggaccgagccgaccgggcaggtgcacggctgcggggacggcagcggcatgaccggccaccacggctggggctacggccaggacgacggcccctcgcattggcacaagctgtatcccattgcccagggagatcgccaatcacccatcaatatcatctccagccaggctgtgtactctcccagcctgcaaccactggagctttcctatgaggcctgcatgtccctcagcatcaccaacaatggccactctgtccaggtagacttcaatgacagcgatgaccgaaccgtggtgactgggggccccctggaagggccctaccgcctcaagcagtttcacttccactggggcaagaagcacgatgtgggttctgagcacacggtggacggcaagtccttccccagcgagctgcatctggttcactggaatgccaagaagtacagcacttttggggaggcggcctcagcacctgatggcctggctgtggttggtgtttttttggagacaggagacgagcaccccagcatgaatcgtctgacagatgcgctctacatggtccggttcaagggcaccaaagcccagttcagctgcttcaaccccaagtgcctcctgcctgccagccggcactactggacctacccgggctctctgacgactcccccactcagtgagagtgtcacctggattgtgctccgggagcccatctgcatctctgaaaggcagatggggaagttccggagcctgctttttacctcggaggacgatgagaggatccacatggtgaacaacttccggccaccacagccactgaagggccgcgtggtaaaggcctccttccgggcctgagctgcccatctgcctagccggccactagggcaccatcttctcaagggcttccatgtcagcagacaccaaaccatctgaggcttcctccctggggggtgctggggaccctccttcagccagtttgctccttggtcaccctggaggcttctggatgggacccttgagtctggggcacccttcagctgccctggggacaggaaggacaggagctaagcagggtccaagcctggggctgcctctgctctccaagacccaaagaccctgggaacctcctctggtcttccccactggcagtggcagcagccccaccccgagcgcacactgtgatggaggagactgagctccctggggcgggcagctgacactaccagagagactcaagcaataattagaggtgggcagagctgccctctcggcattacctcttctgcaggctctgccatgcacgcacctcactgccaggccattaaaatcagcacccagcatgctggaggtgacgtggccttctccctccagccacctgctgccacgggcaggccctggctatagcttatacagtatctccccttgtccccacccagtcaccaaagccacctacatgacagtccatccctgttgaattaataaattaatgtatccatgcaacaaat

SEQ ID NO: 8101 - protein, 264 aa, Homo sapiens [sequence omitted]

SEQ ID NO: 8102 - DNA, 1702 bp, Homo sapiens
gtgagcggggacctcgggggagcggggctccgcgtggcaagggcgcagtgtcccccggagagaatttccccgcagaagtggccgagctgccttctcggccggtacgtgagggaagggggcacttgggggcgcaagcatgtgtctgggtgtctacaccgagcagggtgtttgcgcacgtccgggtgtgagtcgtgggagcccgtggcccacaccagcctcctgggctgacgcggaagagagctccttcatcctgcctcagtttccttaggactcagagaaagggagaagaggcagaaggcccctcgcattggcacaagctgtatcccattgcccagggagatcgccaatcacccatcaatatcatctccagccaggctgtgtactctcccagcctgcaaccactggagctttcctatgaggcctgcatgtccctcagcatcaccaacaatggccactctgtccaggtagacttcaatgacagcgatgaccgaaccgtggtgactgggggccccctggaagggccctaccgcctcaagcagtttcacttccactggggcaagaagcacgatgtgggttctgagcacacggtggacggcaagtccttccccagcgagctgcatctggttcactggaatgccaagaagtacagcacttttggggaggcggcctcagcacctgatggcctggctgtggttggtgtttttttggagacaggagacgagcaccccagcatgaatcgtctgacagatgcgctctacatggtccggttcaagggcaccaaagcccagttcagctgcttcaaccccaagtgcctcctgcctgccagccggcactactggacctacccgggctctctgacgactcccccactcagtgagagtgtcacctggattgtgctccgggagcccatctgcatctctgaaaggcagatggggaagttccggagcctgctttttacctcggaggacgatgagaggatccacatggtgaacaacttccggccaccacagccactgaagggccgcgtggtaaaggcctccttccgggcctgagctgcccatctgcctagccggccactagggcaccatcttctcaagggcttccatgtcagcagacaccaaaccatctgaggcttcctccctggggggtgctggggaccctccttcagccagtttgctccttggtcaccctggaggcttctggatgggacccttgagtctggggcacccttcagctgccctggggacaggaaggacaggagctaagcagggtccaagcctggggctgcctctgctctccaagacccaaagaccctgggaacctcctctggtcttccccactggcagtggcagcagccccaccccgagcgcacactgtgatggaggagactgagctccctggggcgggcagctgacactaccagagagactcaagcaataattagaggtgggcagagctgccctctcggcattacctcttctgcaggctctgccatgcacgcacctcactgccaggccattaaaatcagcacccagcatgctggaggtgacgtggccttctccctccagccacctgctgccacgggcaggccctggctatagcttatacagtatctccccttgtccccacccagtcaccaaagccacctacatgacagtccatccctgttgaattaataaattaatgtatccatgcaacaaat

SEQ ID NO: 8103 - protein, 208 aa, Homo sapiens; identical to SEQ ID NO: 1120

SEQ ID NO: 8104 - DNA, 3830 bp, Homo sapiens
gactagggaccgcctgggtgaggtgaggacctggtggccgcagttgtggcactgtgcgcaggcgctgaactgaccggacggagcgggcggctgtggcctcgccagctggtttaaaaatatccttttttgctgaaggaacacatttgctggtatagtttcagaatgtcaagtactgtgtcctactggatcttaaattctacaaggaacagcattgccacattgcaagggggtagacgcttatactccaggtatgtctcaaataggaataaattaaaatggaggctcttttcccgggtgccacccaccctaaacagttccccatgtggtggctttactctgtgcaaagcctacagacacacatcaacagaggaagatgattttcacttgcaactcagccctgagcagataaatgaagtgcttcgagctggcgagacaacccacaagattcttgaccttgaaagcagagtcccaaattcagtgttgcggtttgagagcaaccagctggctgccaattccccagtggaggaccggcgaggtgtagcctcctgcctgcaaaccaatggactgatgtttggcatcttcgatggacatggtggtcatgcatgtgcccaagcagtgagcgagaggctcttctactatgtggcagtgtccctgatgtcccaccagaccctggagcacatggagggagctatggaaagcatgaaacccttgctgcccatcctgcattggctcaagcacccaggggacagtatctacaaggatgtcacatctgtgcatcttgaccacctccgtgtctattggcaggaactgcttgatttgcacatggaaatgggactaagcattgaagaagcattaatgtactccttccagagactggattctgacatctcgctggaaatccaggcccccctggaagatgaggtgacaaggaacctgtcactccaggttgctttctctggggcaacagcttgcatggcccatgttgatggaattcacttgcacgtggcaaatgctggtgactgccgagccatccttggtgtccaagaggacaatggcatgtggtcttgtctgccccttacacgtgaccacaatgcctggaaccaggccgagctgtcccggctaaagagggagcaccctgagtcagaggacaggacgatcatcatggaggacaggctactgggcgtcctcatcccctgcagggcctttggggatgttcagctgaagtggagtaaagagttgcagcgcagcattctggagaggggcttcaataccgaggccctcaacatttaccagttcacacccccacactactacactccaccctacctgactgctgagcctgaggtcacataccacaggctgaggccccaggataagttccttgtgctggcctcagatggcctgtgggacatgctgagcaatgaggacgtggtaaggctggtggtggggcacctggctgaggcagattggcacaagacagacctggcccagagacccgccaacttggggctcatgcagagcctgctgctgcagaggaaagccagcgggctccacgaggctgaccaaaatgcagccacgcggctgatcagacatgccatcgggaacaatgagtatggggagatggaggcagagcggctggcggcgatgctgacattgccagaggacttggcgaggatgtacagggatgatatcactgtcactgtggtgtattttaactcagaatcaatcggtgcatattacaaggggggttaagaatctcccatcctattgtcaaggttaacataaatgctcttctaaaatgtttcacttactcctaaactagctatccaaaccttactattaaaagcgcaggcagatttaatttgctaaatagactaacaggaggaaaaaaacaaacagcctagctttaaaaaacagtgaaatagcagtgatttcatgtccctgtatgttctgattaagtcttatatgcagagaggacagagcataaagtctatagaattggcttgggcttgtgtagccccagtcatttgataaagatgttgttaaactgtgtcagcctgagccttcaaagggtaaatttaatcatgattctgagaataaagaacttcaggagcttcttaggtcttgccacaaaaatctgcaaatttgataattctcctgaattcacaatcatggacttgtagactatgaagagatattttatttgtttgtcttttatttaaattactaaggtctaggtttacaaagcatactacaggacccttttctatgcaatatcctaacttttttttttgtgattatgcttgtgagaaattttgtaatactacattctagttctgttttcgtttattttaaaactgaatccttaaacttgcaaacacgcctactgtaagcatgcttggaatgacttgttttggttttcagctgataggatctatgcctctggaccagctgaacttactggtgcagctttttgtgccctctactgagtcccattccagaaactttgagccatgctaggaggtaactagtctatgccttaactcctgacctttcctgcattagtaaaatttcctcctgggctgagcctttgggggttgattcacagcatttaagctttctgattatacctctcaaacattcttctgtcaattccacacaatccttctacctctgctatgctgaacccctcattcaccctgcacctgccaactgcaaaatattgtctgaaagaatctttcacatgttcctgcttcctatggctgcaggaaaggagaaaatgtgattgcatgtggtagttgtggtgatagacgtttagacaggacaggttaatttagcggattgtggacttaagattcaacctctatctggagaggtgaaaacacaaaggcttaaggacaacagtttctaaccaagtttctctgaatcctttcctgagaggtggtgggcaggagggaggagtgagacttatcagatgggacgcttgccccaagactgtgggataaaccaccattgctagtcctcaggaattagaccatatttagtataggagttggggcaaaaataaaagtgtaatttgtaatggtttctgtgggctgtagactctttgtatttacttggaaattcagttatgtggatccattttggagatgaatttcatctcatgagttgctgtggcatttaaacaacaggaaatgtgtccctaaatggaaacaaatataatcccacaaaaccaacaattttatttgcctctactacgtcaggcagaattcttcaattaagttgaactacatttgttgatcccttttctcatcttacccctttatgccacctactgaaaagaaaaacaaatagctaggtttggtttcctgttttttgtctatgtcccagctgacattcagtcaaatgttgggatacttctaatttggtggtgtttctttgtacatttttcagtgcaactgtttagtcatgtgttttcatctaagaaattatcttttgaatatttaagccttgatccttttattctgaaaccattaatattccttcttggctgggtgcagtagtttacgcctgtaatcccagcactgtgggaggccgaggcggatggatcacctgaggtcgggaattcgagaccagcctgaccaacatggagaaactccatctctactaaaaatacaaaattagccaggtgtggtggtgcatgcctgtaatcccagctactcgggaggctgaggcaggaaaatcacttgaacccgggaggcggaggttgcggtgagccaagatcgcaccattgcactccagcctgggcaacaagagtgaaactctgtctc

SEQ ID NO: 8105 - protein, 529 aa, Homo sapiens; identical to SEQ ID NO: 1124

SEQ ID NO: 8106 - DNA, 2363 bp, Homo sapiens
cctgggtgaggtgaggacctggtggccgcagttgtggcactgtgcgcaggcgctgaactgaccggacggagcgggcggctgtggcctcgccagctggtttaaaaatatccttttttgctgaaggaacacatttgctggtatagtttcagaatgtcaagtactgtgtcctactggatcttaaattctacaaggaacagcattgccacattgcaagggggtagacgcttatactccaggtatgtctcaaataggaataaattaaaatggaggctcttttcccgggtgccacccaccctaaacagttccccatgtggtggctttactctgtgcaaagcctacagacacacatcaacagaggaagatgattttcacttgcaactcagccctgagcagataaatgaagtgcttcgagctggcgagacaacccacaagattcttgaccttgaaagcagagtcccaaattcagtgttgcggtttgagagcaaccagctggctgccaattccccagtggaggaccggcgaggtgtagcctcctgcctgcaaaccaatggactgatgtttggcatcttcgatggacatggtggtcatgcatgtgcccaagcagtgagcgagaggctcttctactatgtggcagtgtccctgatgtcccaccagaccctggagcacatggagggagctatggaaagcatgaaacccttgctgcccatcctgcattggctcaagcacccaggggacagtatctacaaggatgtcacatctgtgcatcttgaccacctccgtgtctattggcaggaactgcttgatttgcacatggaaatgggactaagcattgaagaagcattaatgtactccttccagagactggattctgacatctcgctggaaatccaggcccccctggaagatgaggtgacaaggaacctgtcactccaggttgctttctctggggcaacagcttgcatggcccatgttgatggaattcacttgcacgtggcaaatgctggtgactgccgagccatccttggtgtccaagaggacaatggcatgtggtcttgtctgccccttacacgtgaccacaatgcctggaaccaggccgagctgtcccggctaaagagggagcaccctgagtcagaggacaggacgatcatcatggaggacaggctactgggcgtcctcatcccctgcagggcctttggggatgttcagctgaagtggagtaaagagttgcagcgcagcattctggagaggggcttcaataccgaggccctcaacatttaccagttcacacccccacactactacactccaccctacctgactgctgagcctgaggtcacataccacaggctgaggccccaggataagttccttgtgctggcctcagatggcctgtgggacatgctgagcaatgaggacgtggtaaggctggtggtggggcacctggctgaggcagattggcacaagacagacctggcccagagacccgccaacttggggctcatgcagagcctgctgctgcagaggaaagccagcgggctccacgaggctgaccaaaatgcagccacgcggctgatcagacatgccatcgggaacaatgagtatggggagatggaggcagagcggctggcggcgatgctgacattgccagaggacttggcgaggatgtacagggatgatatcactgtcactgtggtgtattttaactcagaatcaatcggtgcatattacaaggggggttaagaatctcccatcctattgtcaaggttaacataaatgctcttctaaaatgtttcacttactcctaaactagctatccaaaccttactattaaaagcgcaggcagatttaatttgctaaatagactaacaggaggaaaaaaacaaacagcctagctttaaaaaacagtgaaatagcagtgatttcatgtccctgtatgttctgattaagtcttatatgcagagaggacagagcataaagtctatagaattggcttgggcttgtgtagccccagtcatttgataaagatgttgttaaactgtgtcagcctgagccttcaaagggtaaatttaatcatgattctgagaataaagaacttcaggagcttcttaggtcttgccacaaaaatctgcaaatttgataattctcctgaattcacaatcatggacttgtagactatgaagagatattttatttgtttgtcttttatttaaattactaaggtctaggtttacaaagcatactacaggacccttttctatgcaatatcctaacttttttttttgtgattatgcttgtgagaaattttgtaatactacattctagttctgttttcgtttattttaaaactgaatccttaaacttgc

SEQ ID NO: 8107 - protein, 529 aa, Homo sapiens; identical to SEQ ID NO: 1124

SEQ ID NO: 8108 - DNA, 926 bp, Homo sapiens
cactgtgcgcaggcgctgaactgaccggacggagcgggcggctgtggcctcgccagctgggtggagtgcaatggcacgatctcagctcaccacaacctccgtctcccgggttcaagcgattctcctgcctcagcctcctgagtagctcggattacagggccctggacacaggatgatcccggatggtgaggcggaggtgaggacattgctgtatgagcggagagttggctgagctgctagaatcccttcctctgaaacgaagcagtgaagggatggtgtggggaaggttgtcaaccagccagcatgctcctgggcctgtggaaggggagagtgtccacggttcacttggggtcccagggaccttgccagccctgtactgggctttggcatgaaggggtggagaagctcttccaagctctgactggtgtcttggttactaaatcctgagggtggcatgatgagaacaccagtggggagcctttggctgtggggttctgtgagtgaggcagcatgaagcagaagttgcctctagatgtcgccatctgaccacactggcatcagctgagtgccgttggaggaaaatgttcatgagatgcggcctgaggcctgtccccagcccaagctgggtctcctggcgactgcagcttggagcacctttggaaagcctcctgggacttgggatgtctttggggctgggaacaagtgtgggtggaggaagggccggtcctgtggtcacccagccctgtcttgtagggaaggaactgctggggtcccaggagaagccagagccaggcagtgagctccagatggtgggggagtggctgccaccttgaccatcttcccccgcatggctgttctcctctgtggaccaccccatgcctctgacccccatcctccctaccccattccctacagccagtccccac

SEQ ID NO: 8109 - protein, 83 aa, Homo sapiens [sequence omitted]

SEQ ID NO: 8110 - DNA, 2368 bp, Homo sapiens
actctttgtatttacttggaaattcagttatgtggatccattttggagatgaatttcatctcatgagttgctgtggcatttaaacaacaggaaatgtgtccctaaatggaaacaaatataatcccacaaaaccaacaattttatttgcctctactacgtcaggcagaattcttcaattaagttgaactacatttgttgatcccttttctcatcttacccctttatgccacctactgaaaagaaaaacaaatagctaggtttggtttcctgttttttgtctatgtcccagctgacattcagtcaaatgttgggatacttctaatttggtggtgtttctttgtacatttttcagtgcaactgtttagtcatgtgttttcatctaagaaattatcttttgaatatttaagccttgatccttttattctgaaaccattaatattccttcttggctgggtgcagtagtttacgcctgtaatcccagcactgtgggaggccgaggcggatggatcacctgaggtcgggaattcgagaccagcctgaccaacatggagaaactccatctctactaaaaatacaaaattagccagtagctgggactatgcaccaccatgcctggctaatttttttaattttttgtagagacagggttttgccatgttgcccaggctggtctcaaactcctagactcaagcaatctgcccacctcggcctcccaaggtgctgggatgataggcatgagccaccgcacccagcctatctcctagatcttgaatcaaaaataaaatgtaaatcacttccattctgctagcatgagggtttgttgctaaaattgaggattctatctgacgtttactttttgttgttttttgagacaaggtcttgctttgtcgcccatgctggagtgcagtggcatcattataactcactgtcaaactcctggactccaatgttccctccccttttagcctcccaagtagctgggtctacaggcatgaaccatcaggcccagataattaaaaaaactttttttggtgaaaacatgatcttgctatgttgctcaggctggttgtctggcattttctttgtcctttattctttatactagctaaaccctggagtatccttgaagcctttactggcatacagagtacctgaatcttactttggagcctagcatgggtcataaatatatctgattcattaacctgtgagacagctgagagaacacagactccttacctgtatctccaggcatatctggtttttctctgcctaatagattttcctgctttctagttagtaatattgagaaagaagaaaggcttatttatcatttgctttttttccactgtgaatcatctgttctttccatgaacattctggggagcacctcctgattaaactcctgtctccctgaccactatcctgctgtcattggacttcttgaagcacatgggctactgccccaggacactgggatttgagaggagtttagtggtaattgtcaggtctttcaaagcatttattattccttttatacggagatttcagtattgagacttaaaatgaactgaaaaatgagattgaacatttaatattttggatgtaacttttgaagaaagtatgctttggtgcttaaaattgtatatgattttaggtaagaaactttgataatattggcataatttagatttattttctttcttttttttgagacagtctcactcagtcgcccaggctgaagtgcagtgacacagtctcagctcactgcaacgtctgcctcccagattgaagtgactctcgtgcctctgccacagagtagctgggattacaggcatgcaccaccacacaccgctaattttttgtatttttagtagagacagagtttcaccatgttggccaggctgcgaactcctgagctcaagtgatcctcccacctcagcttcccaaagtgctagcattacaggcatgagccaccacacctcaccagatttttaaaaaatatataactgcatctctcttgattctggggcttggtaaaaatggatagataagatagtattctaaattcaaattcgtggctaggcacagtggcccacacctgtaatcccagcactttgggattccaagacagaagactcacttgagtacagtatgagaccagcctgggcaacatagatcttgcctctacaaaaaaaaaaaaaaatagccaggtgtggcacatgcctgtagtctcagctgcttggaaggctgaaatgagaggatctcttgagcccaggaggtctaggccagagtgagctgtgatcgtgccattgcactccagactgagtgacagagtgagactgtgtctaaaaaaaaagtttgaatt

SEQ ID NO: 8111 - protein, 69 aa, Homo sapiens
MHHHAWLIFLIFCRDRVLPCCPGWSQTPRLKQSAHLGLPRCWDDRHEPPHPAYLLDLESKIKCKSLPFC

SEQ ID NO: 8112 - DNA, 1801 bp, Homo sapiens
ttccttccttccttccttccttccttccttccttccttccttcctctctctctctttctttctttctttccttcttgacagggtctccctgtagccaggctggtctcaaactcctagactcaagcaatctgcccacctcggcctcccaaggtgctgggatgataggcatgagccaccgcacccagcctatctcctagatcttgaatcaaaaataaaatgtaaatcacttccattctgctagcatgagggtttgttgctaaaattgaggattctatctgacgtttactttttgttgttttttgagacaaggtcttgctttgtcgcccatgctggagtgcagtggcatcattataactcactgtcaaactcctggactccaatgttccctccccttttagcctcccaagtagctgggtctacaggcatgaaccatcaggcccagataattaaaaaaactttttttggtgaaaacatgatcttgctatgttgctcaggctggttgtctggcattttctttgtcctttattctttatactagctaaaccctggagtatccttgaagcctttactggcatacagagtacctgaatcttactttggagcctagcatgggtcataaatatatctgattcattaacctgtgagacagctgagagaacacagactccttacctgtatctccaggcatatctggtttttctctgcctaatagattttcctgctttctagttagtaatattgagaaagaagaaaggcttatttatcatttgctttttttccactgtgaatcatctgttctttccatgaacattctggggagcacctcctgattaaactcctgtctccctgaccactatcctgctgtcattggacttcttgaagcacatgggctactgccccaggacactgggatttgagaggagtttagtggtaattgtcaggtctttcaaagcatttattattccttttatacggagatttcagtattgagacttaaaatgaactgaaaaatgagattgaacatttaatattttggatgtaacttttgaagaaagtatgctttggtgcttaaaattgtatatgattttaggtaagaaactttgataatattggcataatttagatttattttctttcttttttttgagacagtctcactcagtcgcccaggctgaagtgcagtgacacagtctcagctcactgcaacgtctgcctcccagattgaagtgactctcgtgcctctgccacagagtagctgggattacaggcatgcaccaccacacaccgctaattttttgtatttttagtagagacagagtttcaccatgttggccaggctgcgaactcctgagctcaagtgatcctcccacctcagcttcccaaagtgctagcattacaggcatgagccaccacacctcaccagatttttaaaaaatatataactgcatctctcttgattctggggcttggtaaaaatggatagataagatagtattctaaattcaaattcgtggctaggcacagtggcccacacctgtaatcccagcactttgggattccaagacagaagactcacttgagtacagtatgagaccagcctgggcaacatagatcttgcctctacaaaaaaaaaaaaaaatagccaggtgtggcacatgcctgtagtctcagctgcttggaaggctgaaatgagaggatctcttgagcccaggaggtctaggccagagtgagctgtgatcgtgccattgcactccagactgagtgacagagtgagactgtgtctaaaaaaaaagtttgaatt

SEQ ID NO: 8113 - protein, 53 aa, Homo sapiens
MHHHTPLIFCIFSRDRVSPCWPGCELLSSSDPPTSASQSASITGMSHHTSPDF

SEQ ID NO: 8114 - DNA, 2097 bp, Homo sapiens
ctctctctctttctttctttctttccttcttgacagggtctccctgtagccaggctggagtgcaatggcatgatcttggctcactgcaacctctgcagcccaggctcaaacgatcctcctgcctcagcctcccgagtagctgggactatgcaccaccatgcctggctaatttttttaattttttgtagagacagggttttgccatgttgcccaggctggtctcaaactcctagactcaagcaatctgcccacctcggcctcccaaggtgctgggatgataggcatgagccaccgcacccagcctatctcctagatcttgaatcaaaaataaaatgtaaatcacttccattctgctagcatgagggtttgttgctaaaattgaggattctatctgacgtttactttttgttgttttttgagacaaggtcttgctttgtcgcccatgctggagtgcagtggcatcattataactcactgtcaaactcctggactccaatgttccctccccttttagcctcccaagtagctgggtctacaggcatgaaccatcaggcccagataattaaaaaaactttttttggtgaaaacatgatcttgctatgttgctcaggctggttgtctggcattttctttgtcctttattctttatactagctaaaccctggagtatccttgaagcctttactggcatacagagtacctgaatcttactttggagcctagcatgggtcataaatatatctgattcattaacctgtgagacagctgagagaacacagactccttacctgtatctccaggcatatctggtttttctctgcctaatagattttcctgctttctagttagtaatattgagaaagaagaaaggcttatttatcatttgctttttttccactgtgaatcatctgttctttccatgaacattctggggagcacctcctgattaaactcctgtctccctgaccactatcctgctgtcattggacttcttgaagcacatgggctactgccccaggacactgggatttgagaggagtttagtggtaattgtcaggtctttcaaagcatttattattccttttatacggagatttcagtattgagacttaaaatgaactgaaaaatgagattgaacatttaatattttggatgtaacttttgaagaaagtatgctttggtgcttaaaattgtatatgattttaggtaagaaactttgataatattgtgccattgcactccagcctgggcaacatgagcgaaactccatctcaaaaaaacaaaaacaaaaaacaaactcaaattagcatgatagatcaggctacttagattcagctttctgagatgttatttgttaacattaaggctaatttattataatgaaaatgtaaactttgaggtatgttaatatataaacatctttttcctttggcctaaaaggtctttagtattcagcacactgggtaaagttcagtttagacacaatcaaattggcatcttttaaacataagtgaaatatagagagcttgaacttgagttacttaaagaagatacagtataattaattatacagaacaaaacaaagatgtgtttagagtgactctggcctgactcttgtccatcagcccctagtagcctatcttcagcctttgggaagtcttaacttcccaggttaaactagaatattctggaactgagctgtccaaatttcatcttaaagtggatcatttgactctgaaacacgattctcatggcagaaaaagccctggtgtttccttggagctggggataaaggccagtgagccagcctgtgatgagagctgcccctggcactatctgagtggaaagctcattgggacagccatgcagctatcagagccgactgaagccctgtcccttacccctcaggcacctgatgcttaacttgcctcctgggaaataatgatctagcatttacttggaacaatgattaatcatgttctttaataattgctgacatttgtattttaagctgtataccaatgttcgtatttgacattgattttctaaccattagagatatttaattaaaacttggaaatgaaagaaacaaaatga

SEQ ID NO: 8115 - protein, 95 aa, Homo sapiens
MILAHCNLCSPGSNDPPASASRVAGTMHHHAWLIFLIFCRDRVLPCCPGWSQTPRLKQSAHLGLPRCWDDRHEPPHPAYLLDLESKIKCKSLPFC

SEQ ID NO: 8116 - DNA, 1988 bp, Homo sapiens
gggttttgccatgttgcccaggctggtctcaaactcctagactcaagcaatctgcccacctcggcctcccaaggtgctgggatgataggcatgagccaccgcacccagcctatctcctagatcttgaatcaaaaataaaatgtaaatcacttccattctgctagcatgagggtttgttgctaaaattgaggattctatctgacgtttactttttgttgttttttgagacaaggtcttgctttgtcgcccatgctggagtgcagtggcatcattataactcactgtcaaactcctggactccaatgttccctccccttttagcctcccaagtagctgggtctacaggcatgaaccatcaggcccagataattaaaaaaactttttttggtgaaaacatgatcttgctatgttgctcaggctggttgtctggcattttctttgtcctttattctttatactagctaaaccctggagtatccttgaagcctttactggcatacagagtacctgaatcttactttggagcctagcatgggtcataaatatatctgattcattaacctgtgagacagctgagagaacacagactccttacctgtatctccaggcatatctggtttttctctgcctaatagattttcctgctttctagttagtaatattgagaaagaagaaaggcttatttatcatttgctttttttccactgtgaatcatctgttctttccatgaacattctggggagcacctcctgattaaactcctgtctccctgaccactatcctgctgtcattggacttcttgaagcacatgggctactgccccaggacactgggatttgagaggagtttagtggtaattgtcaggtctttcaaagcatttattattccttttatacggagatttcagtattgagacttaaaatgaactgaaaaatgagattgaacatttaatattttggatgtaacttttgaagaaagtatgctttggtgcttaaaattgtatatgattttaggtaagaaactttgataatattggcataatttagatttattttctttcttttttttgagacagtctcactcagtcgcccaggctgaagttgcagtgagctgagattgtgccattgcactccagcctgggcaacatgagcgaaactccatctcaaaaaaacaaaaacaaaaaacaaactcaaattagcatgatagatcaggctacttagattcagctttctgagatgttatttgttaacattaaggctaatttattataatgaaaatgtaaactttgaggtatgttaatatataaacatctttttcctttggcctaaaaggtctttagtattcagcacactgggtaaagttcagtttagacacaatcaaattggcatcttttaaacataagtgaaatatagagagcttgaacttgagttacttaaagaagatacagtataattaattatacagaacaaaacaaagatgtgtttagagtgactctggcctgactcttgtccatcagcccctagtagcctatcttcagcctttgggaagtcttaacttcccaggttaaactagaatattctggaactgagctgtccaaatttcatcttaaagtggatcatttgactctgaaacacgattctcatggcagaaaaagccctggtgtttccttggagctggggataaaggccagtgagccagcctgtgatgagagctgcccctggcactatctgagtggaaagctcattgggacagccatgcagctatcagagccgactgaagccctgtcccttacccctcaggcacctgatgcttaacttgcctcctgggaaataatgatctagcatttacttggaacaatgattaatcatgttctttaataattgctgacatttgtattttaagctgtataccaatgttcgtatttgacattgattttctaaccattagagatatttaattaaaacttggaaatgaaagaaacaaaatga

SEQ ID NO: 8117 - protein, 52 aa, Homo sapiens
MFPPLLASQVAGSTGMNHQAQIIKKTFFGENMILLCCSGWLSGIFFVLYSLY

SEQ ID NO: 8118 - DNA, 727 bp, Homo sapiens
aaaaaaacaaaaacaaaaaacaaactcaaattagcatgatagatcaggctacttagattcagctttctgagatgttatttgttaacattaaggctaatttattataatgaaaatgtaaactttgaggtatgttaatatataaacatctttttcctttggcctaaaaggtctttagtattcagcacactgggtaaagttcagtttagacacaatcaaattggcatcttttaaacataagtgaaatatagagagcttgaacttgagttacttaaagaagatacagtataattaattatacagaacaaaacaaagatgtgtttagagtgactctggcctgactcttgtccatcagcccctagtagcctatcttcagcctttgggaagtcttaacttcccaggttaaactagaatattctggaactgagctgtccaaatttcatcttaaagtggatcatttgactctgaaacacgattctcatggcagaaaaagccctggtgtttccttggagctggggataaaggccagtgagccaccctgtcccttacccctcaggcacctgatgcttaacttgcctcctgggaaataatgatctagcatttacttggaacaatgattaatcatgttctttaataattgctgacatttgtattttaagctgtataccaatgttcgtatttgacattgattttctaaccattagagatatttaattaaaacttggaaatg

SEQ ID NO: 8119 - protein, 31 aa, Homo sapiens
YINIFFLWPKRSLVFSTLGKVQFRHNQIGIF

SEQ ID NO: 8120 - DNA, 2846 bp, Homo sapiens
agagccccctggagaaggagctctcttcttgcttggcagctggaccaagggagccagtcttgggcgctggagggcctgtcctgaccatggtccctgcctggctgtggctgctttgtgtctccgtcccccaggctctccccaaggcccagcctgcagagctgtctgtggaagttccagaaaactatggtggaaatttccctttatacctgaccaagttgccgctgccccgtgagggggctgaaggccagatcgtgctgtcaggggactcaggcaaggcaactgagggcccatttgctatggatccagattctggcttcctgctggtgaccagggccctggaccgagaggagcaggcagagtaccagctacaggtcaccctggagatgcaggatggacatgtcttgtggggtccacagcctgtgcttgtgcacgtgaaggatgagaatgaccaggtgccccatttctctcaagccatctacagagctcggctgagccggggtaccaggcctggcatccccttcctcttccttgaggcttcagaccgggatgagccaggcacagccaactcggatcttcgattccacatcctgagccaggctccagcccagccttccccagacatgttccagctggagcctcggctgggggctctggccctcagccccaaggggagcaccagccttgaccacgccctggagaggacctaccagctgttggtacaggtcaaggacatgggtgaccaggcctcaggccaccaggccactgccaccgtggaagtctccatcatagagagcacctgggtgtccctagagcctatccacctggcagagaatctcaaagtcctatacccgcaccacatggcccaggtacactggagtgggggtgatgtgcactatcacctggagagccatcccccgggaccctttgaagtgaatgcagagggaaacctctacgtgaccagagagctggacagagaagcccaggctgagtacctgctccaggtgcgggctcagaattcccatggcgaggactatgcggcccctctggagctgcacgtgctggtgatggatgagaatgacaacgtgcctatctgccctccccgtgaccccacagtcagcatccctgagctcagtccaccaggtactgaagtgactagactgtcagcagaggatgcagatgcccccggctcccccaattcccacgttgtgtatcagctcctgagccctgagcctgaggatggggtagaggggagagccttccaggtggaccccacttcaggcagtgtgacgctgggggtgctcccactccgagcaggccagaacatcctgcttctggtgctggccatggacctggcaggcgcagagggtggcttcagcagcacgtgtgaagtcgaagtcgcagtcacagatatcaatgatcacgcccctgagttcatcacttcccagattgggcctataagcctccctgaggatgtggagcccgggactctggtggccatgctaacagccattgatgctgacctcgagcccgccttccgcctcatggattttgccattgagaggggagacacagaagggacttttggcctggattgggagccagactctgggcatgttagactcagactctgcaagaacctcagttatgaggcagctccaagtcatgaggtggtggtggtggtgcagagtgtggcgaagctggtggggccaggcccaggccctggagccaccgccacggtgactgtgctagtggagagagtgatgccaccccccaagttggaccaggagagctacgaggccagtgtccccatcagtgccccagccggctctttcctgctgaccatccagccctccgaccccatcagccgaaccctcaggttctccctagtcaatgactcagagggctggctctgcattgagaaattctccggggaggtgcacaccgcccagtccctgcagggcgcccagcctggggacacctacacggtgcttgtggaggcccaggatacagatgagccgagactgagcgcttctgcacccctggtgatccacttcctaaaggcccctcctgccccagccctgactcttgcccctgtgccctcccaatacctctgcacaccccgccaagaccatggcttgatcgtgagtggacccagcaaggaccccgatctggccagtgggcacggtccctacagcttcacccttggtcccaaccccacggtgcaacgggattggcgcctccagactctcaatggttcccatgcctacctcaccttggccctgcattgggtggagccacgtgaacacataatccccgtggtggtcagccacaatgcccagatgtggcagctcctggttcgagtgatcgtgtgtcgctgcaacgtggaggggcagtgcatgcgcaaggtgggccgcatgaagggcatgcccacgaagctgtcggcagtgggcatccttgtaggcaccctggtagcaataggaatcttcctcatcctcattttcacccactggaccatgtcaaggaagaaggacccggatcaaccagcagacagcgtgcccctgaaggcgactgtctgaatggcccaggcagctctagctgggagcttggcctctggctccatctgagtcccctgggagagagcccagcacccaagatccagcaggggacaggacagagtagaagcccctccatctgccctggggtggaggcaccatcaccatcaccaggcatgtctgcagagcctggacaccaactttatggactgcccatgggagtgctccaaatgtcagggtgtttgcccaataataaagccccagagaactgggctgggccctatgggattggta

SEQ ID NO: 8121 - protein, 829 aa, Homo sapiens; identical to SEQ ID NO: 1126

SEQ ID NO: 8122 - DNA, 3533 bp, Homo sapiens
gcctggccagagccccctggagaaggagctctcttcttgcttggcagctggaccaagggagccagtcttgggcgctggagggcctgtcctgaccatggtccctgcctggctgtggctgctttgtgtctccgtcccccaggctctccccaaggcccagcctgcagagctgtctgtggaagttccagaaaactatggtggaaatttccctttatacctgaccaagttgccgctgccccgtgagggggctgaaggccagatcgtgctgtcaggggactcaggcaaggcaactgagggcccatttgctatggatccagattctggcttcctgctggtgaccagggccctggaccgagaggagcaggcagagtaccagctacaggtcaccctggagatgcaggatggacatgtcttgtggggtccacagcctgtgcttgtgcacgtgaaggatgagaatgaccaggtgccccatttctctcaagccatctacagagctcggctgagccggggtaccaggcctggcatccccttcctcttccttgaggcttcagaccgggatgagccaggcacagccaactcggatcttcgattccacatcctgagccaggctccagcccagccttccccagacatgttccagctggagcctcggctgggggctctggccctcagccccaaggggagcaccagccttgaccacgccctggagaggacctaccagctgttggtacaggtcaaggacatgggtgaccaggcctcaggccaccaggccactgccaccgtggaagtctccatcatagagagcacctgggtgtccctagagcctatccacctggcagagaatctcaaagtcctatacccgcaccacatggcccaggtacactggagtgggggtgatgtgcactatcacctggagagccatcccccgggaccctttgaagtgaatgcagagggaaacctctacgtgaccagagagctggacagagaagcccaggctgagtacctgctccaggtgcgggctcagaattcccatggcgaggactatgcggcccctctggagctgcacgtgctggtgatggatgagaatgacaacgtgcctatctgccctccccgtgaccccacagtcagcatccctgagctcagtccaccaggtactgaagtgactagactgtcagcagaggatgcagatgcccccggctcccccaattcccacgttgtgtatcagctcctgagccctgagcctgaggatggggtagaggggagagccttccaggtggaccccacttcaggcagtgtgacgctgggggtgctcccactccgagcaggccagaacatcctgcttctggtgctggccatggacctggcaggcgcagagggtggcttcagcagcacgtgtgaagtcgaagtcgcagtcacagatatcaatgatcacgcccctgagttcatcacttcccagattgggcctataagcctccctgaggatgtggagcccgggactctggtggccatgctaacagccattgatgctgacctcgagcccgccttccgcctcatggattttgccattgagaggggagacacagaagggacttttggcctggattgggagccagactctgggcatgttagactcagactctgcaagaacctcagttatgaggcagctccaagtcatgaggtggtggtggtggtgcagagtgtggcgaagctggtggggccaggcccaggccctggagccaccgccacggtgactgtgctagtggagagagtgatgccaccccccaagttggaccaggagagctacgaggccagtgtccccatcagtgccccagccggctctttcctgctgaccatccagccctccgaccccatcagccgaaccctcaggttctccctagtcaatgactcagagggctggctctgcattgagaaattctccggggaggtgcacaccgcccagtccctgcagggcgcccagcctggggacacctacacggtgcttgtggaggcccaggatacaggtatggccaggcagtgatgggagcccctgggagggggtacaaacctcagacagacagacagcaggactgagcttcctcccagaggccctcactggcaacccccagccccaagcaggagaggcagatatgaagctgggttcaatgttcctctctgagaatggatctactcctccggtgggcaagtctggcatctgcctcccctctctgatcattctcctagattgacacacaaaatctcccagccctgtcctttagccactggagggcctctcagggtgtcagcttcagggactggtatagggccggggaggtggcaggaggaccaggggctgcccctggggaaggagtgctggagtgaatgggccactggagccaggtgtggaggacactgaacactgctcaggacagagagctggccctggggtggggagccccgggaggcaggtttcaactctgagctgggctgtgatacagggcagacccagcagcagtgagctccgccaaagtcagggatgtccacagtggcatggggatgatgacaggtggagagaagcatggagggagcatggcaggggagtctataaggcgaggctcatgggctgcgggagcagcccagggacctcagagctcaccctccccctggcaacacctggccagctcagcactgcctcctctgcagatgagccgagactgagcgcttctgcacccctggtgatccacttcctaaaggcccctcctgccccagccctgactcttgcccctgtgccctcccaatacctctgcacaccccgccaagaccatggcttgatcgtgagtggacccagcaaggaccccgatctggccagtgggcacggtccctacagcttcacccttggtcccaaccccacggtgcaacgggattggcgcctccagactctcaatggttcccatgcctacctcaccttggccctgcattgggtggagccacgtgaacacataatccccgtggtggtcagccacaatgcccagatgtggcagctcctggttcgagtgatcgtgtgtcgctgcaacgtggaggggcagtgcatgcgcaaggtgggccgcatgaagggcatgcccacgaagctgtcggcagtgggcatccttgtaggcaccctggtagcaataggaatcttcctcatcctcattttcacccactggaccatgtcaaggaagaaggacccggatcaaccagcagacagcgtgcccctgaaggcgactgtctgaatggcccaggcagctctagctgggagcttggcctctggctccatctgagtcccctgggagagagcccagcacccaagatccagcaggggacaggacagagtagaagcccctccatctgccctggggtggaggcaccatcaccatcaccaggcatgtctgcagagcctggacaccaactttatggactgcccatgggagtgctccaaatgtcagggtgtttgcccaataataaagccccagagaactgggctgggccctatgggattggta

SEQ ID NO: 8123 - protein, 646 aa, Homo sapiens
MVPAWLWLLCVSVPQALPKAQPAELSVEVPENYGGNFPLYLTKLPLPREGAEGQIVLSGDSGKATEGPFAMDPDSGFLLVTRALDREEQAEYQLQVTLEMQDGHVLWGPQPVLVHVKDENDQVPHFSQAIYRARLSRGTRPGIPFLFLEASDRDEPGTANSDLRFHILSQAPAQPSPDMFQLEPRLGALALSPKGSTSLDHALERTYQLLVQVKDMGDQASGHQATATVEVSIIESTWVSLEPIHLAENLKVLYPHHMAQVHWSGGDVHYHLESHPPGPFEVNAEGNLYVTRELDREAQAEYLLQVRAQNSHGEDYAAPLELHVLVMDENDNVPICPPRDPTVSIPELSPPGTEVTRLSAEDADAPGSPNSHVVYQLLSPEPEDGVEGRAFQVDPTSGSVTLGVLPLRAGQNILLLVLAMDLAGAEGGFSSTCEVEVAVTDINDHAPEFITSQIGPISLPEDVEPGTLVAMLTAIDADLEPAFRLMDFAIERGDTEGTFGLDWEPDSGHVRLRLCKNLSYEAAPSHEVVVVVQSVAKLVGPGPGPGATATVTVLVERVMPPPKLDQESYEASVPISAPAGSFLLTIQPSDPISRTLRFSLVNDSEGWLCIEKFSGEVHTAQSLQGAQPGDTYTVLVEAQDTGMARQ

SEQ ID NO: 8124 - DNA, 2821 bp, Homo sapiens
gctcaagtgccctgccttgccccacccagcccagcctggccagagccccctggagaaggagctctcttcttgcttggcagctggaccaagggagccagtcttgggcgctggagggcctgtcctgaccatggtccctgcctggctgtggctgctttgtgtctccgtcccccaggctctccccaaggcccagcctgcagagctgtctgtggaagttccagaaaactatggtggaaatttccctttatacctgaccaagttgccgctgccccgtgagggggctgaaggccagatcgtgctgtcaggggactcaggcaaggcaactgagggcccatttgctatggatccagattctggcttcctgctggtgaccagggccctggaccgagaggagcaggcagagtaccagctacaggtcaccctggagatgcaggatggacatgtcttgtggggtccacagcctgtgcttgtgcacgtgaaggatgagaatgaccaggtgccccatttctctcaagccatctacagagctcggctgagccggggtaccaggcctggcatccccttcctcttccttgaggcttcagaccgggatgagccaggcacagccaactcggatcttcgattccacatcctgagccaggctccagcccagccttccccagacatgttccagctggagcctcggctgggggctctggccctcagccccaaggggagcaccagccttgaccacgccctggagaggacctaccagctgttggtacaggtcaaggacatgggtgaccaggcctcaggccaccaggccactgccaccgtggaagtctccatcatagagagcacctgggtgtccctagagcctatccacctggcagagaatctcaaagtcctatacccgcaccacatggcccaggtacactggagtgggggtgatgtgcactatcacctggagagccatcccccgggaccctttgaagtgaatgcagagggaaacctctacgtgaccagagagctggacagagaagcccaggctgagtacctgctccaggtgcgggctcagaattcccatggcgaggactatgcggcccctctggagctgcacgtgctggtgatggatgagaatgacaacgtgcctatctgccctccccgtgaccccacagtcagcatccctgagctcagtccaccaggtactgaagtgactagactgtcagcagaggatgcagatgcccccggctcccccaattcccacgttgtgtatcagctcctgagccctgagcctgaggatggggtagaggggagagccttccaggtggaccccacttcaggcagtgtgacgctgggggtgctcccactccgagcaggccagaacatcctgcttctggtgctggccatggacctggcaggcgcagagggtggcttcagcagcacgtgtgaagtcgaagtcgcagtcacagatatcaatgatcacgcccctgagttcatcacttcccagattgggcctataagcctccctgaggatgtggagcccgggactctggtggccatgctaacagccattgatgctgacctcgagcccgccttccgcctcatggattttgccattgagaggggagacacagaagggacttttggcctggattgggagccagactctgggcatgttagactcagactctgcaagaacctcagttatgaggcagctccaagtcatgaggtggtggtggtggtgcagagtgtggcgaagctggtggggccaggcccaggccctggagccaccgccacggtgactgtgctagtggagagagtgatgccaccccccaagttggaccaggagagctacgaggccagtgtccccatcagtgccccagccggctctttcctgctgaccatccagccctccgaccccatcagccgaaccctcaggttctccctagtcaatgactcagagggctggctctgcattgagaaattctccggggaggtgcacaccgcccagtccctgcagggcgcccagcctggggacacctacacggtgcttgtggaggcccaggatacagccctgactcttgcccctgtgccctcccaatacctctgcacaccccgccaagaccatggcttgatcgtgagtggacccagcaaggaccccgatctggccagtgggcacggtccctacagcttcacccttggtcccaaccccacggtgcaacgggattggcgcctccagactctcaatggttcccatgcctacctcaccttggccctgcattgggtggagccacgtgaacacataatccccgtggtggtcagccacaatgcccagatgtggcagctcctggttcgagtgatcgtgtgtcgctgcaacgtggaggggcagtgcatgcgcaaggtgggccgcatgaagggcatgcccacgaagctgtcggcagtgggcatccttgtaggcaccctggtagcaataggaatcttcctcatcctcattttcacccactggaccatgtcaaggaagaaggacccggatcaaccagcagacagcgtgcccctgaaggcgactgtctgaatggcccaggcagctctagctgggagcttggcctctggctccatctgagtcccctgggagagagcccagcacccaagatccagcaggggacaggacagagtagaagcccctccatctgccctggggtggaggcaccatcaccatcaccaggcatgtctgcagagcctggacaccaactttatggactgcccatgggagtgctccaaatgtcagggtgtttgcccaataataaagccccagagaactgggctgggccctatgggattggta

SEQ ID NO: 8125 - protein, 807 aa, Homo sapiens
MVPAWLWLLCVSVPQALPKAQPAELSVEVPENYGGNFPLYLTKLPLPREGAEGQIVLSGDSGKATEGPFAMDPDSGFLLVTRALDREEQAEYQLQVTLEMQDGHVLWGPQPVLVHVKDENDQVPHFSQAIYRARLSRGTRPGIPFLFLEASDRDEPGTANSDLRFHILSQAPAQPSPDMFQLEPRLGALALSPKGSTSLDHALERTYQLLVQVKDMGDQASGHQATATVEVSIIESTWVSLEPIHLAENLKVLYPHHMAQVHWSGGDVHYHLESHPPGPFEVNAEGNLYVTRELDREAQAEYLLQVRAQNSHGEDYAAPLELHVLVMDENDNVPICPPRDPTVSIPELSPPGTEVTRLSAEDADAPGSPNSHVVYQLLSPEPEDGVEGRAFQVDPTSGSVTLGVLPLRAGQNILLLVLAMDLAGAEGGFSSTCEVEVAVTDINDHAPEFITSQIGPISLPEDVEPGTLVAMLTAIDADLEPAFRLMDFAIERGDTEGTFGLDWEPDSGHVRLRLCKNLSYEAAPSHEVVVVVQSVAKLVGPGPGPGATATVTVLVERVMPPPKLDQESYEASVPISAPAGSFLLTIQPSDPISRTLRFSLVNDSEGWLCIEKFSGEVHTAQSLQGAQPGDTYTVLVEAQDTALTLAPVPSQYLCTPRQDHGLIVSGPSKDPDLASGHGPYSFTLGPNPTVQRDWRLQTLNGSHAYLTLALHWVEPREHIIPVVVSHNAQMWQLLVRVIVCRCNVEGQCMRKVGRMKGMPTKLSAVGILVGTLVAIGIFLILIFTHWTMSRKKDPDQPADSVPLKATV

SEQ ID NO: 8126 - DNA, 535 bp, Homo sapiens
gactcgctcagctcagggggcagcgactcagacgagagcgtttacaaggtgctgctgctgggggcgcccggcgtgggcaagagcgccatggcctttcgcgccaaatccaagtcctgccacgacctctcggttctctaggtcccacccgctcccactatggtgggagacgaacggaagggttggtgggctggcccagccaactgccccgggtgcctcagagcaggctcagactctgggtccctcggagctgccagccgggcacccccaacctcatggtcatggacagatagacagtgctgccctgcgaagtggctctcaggggccagtgagggctgggcccacagagatgcatgcgcaggctcatatgcgtcccaagcagccgcagcgcagccgccgggcaggcctgcgtgccgggagaggactctgccttttttcacagcccgggtgtgcctgccctggagggaggctcttcagtgcggtagctatttgtttacatgcagatttttgtaataaaggctatttcctgatagtcatg

SEQ ID NO: 8127 - protein, 117 aa, Homo sapiens
MVGDERKGWWAGPANCPGCLRAGSDSGSLGAASRAPPTSWSWTDRQCCPAKWLSGASEGWAHRDACAGSYASQAAAAQPPGRPACRERTLPFFTARVCLPWREALQCGSYLFTCRFL

SEQ ID NO: 8128 - DNA, 382 bp, Homo sapiens
caggcacccggaggcgagagagccttggcaaaaaggcgaagcgcttcttgggccgcatcgtagctcgtaacagccgcaagatggcctttcgcgccaaatccaagtcctgccacgacctcatggtcatggacagatagacagtgctgccctgcgaagtggctctcaggggccagtgagggctgggcccacagagatgcatgcgcaggctcatatgcgtcccaagcagccgcagcgcagccgccgggcaggcctgcgtgccgggagaggactctgccttttttcacagcccgggtgtgcctgccctggagggaggctcttcagtgcggtagctatttgtttacatgcagatttttgtaataaaggctatttcctgatagtcatg

SEQ ID NO: 8129 - protein, 62 aa, Homo sapiens
MHAQAHMRPKQPQRSRRAGLRAGRGLCLFSQPGCACPGGRLFSAVAICLHADFCNKGYFLIV

SEQ ID NO: 8130 - DNA, 1058 bp, Homo sapiens
ttgtagtggacggagaagaggcatcactcatggtctacgacatttgggagcaggtagggtgcaagcagagacccagggcaggggagggaggagtgagttgggttagaggtctgggagtgccaggctcgtgtcgggggcatgaggactgttgggcagatgtgtgttgtgtgttctccaggacgggggccgctggttgcccggccactgcatggccatgggggatgcctatgtcattgtgtactcagtgacggacaagggcagcttcgagaaggcctcagaactgcgggtccagctgcggcgtgcacggcaaacagatgatgtgcccatcatcctcgtgggcaacaagagcgacctggtgcgctctcgtgaggtctcggtggatgagggccgggcctgcgcggtggtctttgactgcaagttcattgagacatcagcggcattgcaccacaatgtccaggcgctgtttgaaggtgtcgtgcgccagatacgcctgcgcagggacagcaaagaagccaacgcacgacggcaagcaggcacccggaggcgagagagccttggcaaaaaggcgaagcgcttcttgggccgcatcgtagctcgtaacagccgcaagatggcctttcgcgccaaatccaagtcctgccacgacctctcggttctctaggtcccacccgctcccactatggtgggagacgaacggaagggttggtgggctggcccagccaactgccccgggtgcctcagagcaggctcagactctgggtccctcggagctgccagccgggcacccccaacctcatggtcatggacagatagacagtgctgccctgcgaagtggctctcaggggccagtgagggctgggcccacagagatgcatgcgcaggctcatatgcgtcccaagcagccgcagcgcagccgccgggcaggcctgcgtgccgggagaggactctgccttttttcacagcccgggtgtgcctgccctggagggaggctcttcagtgcggtagctatttgtttacatgcagatttttgtaataaaggctatttcctgatagtcatg

SEQ ID NO: 8131 - protein, 150 aa, Homo sapiens
MAMGDAYVIVYSVTDKGSFEKASELRVQLRRARQTDDVPIILVGNKSDLVRSREVSVDEGRACAVVFDCKFIETSAALHHNVQALFEGVVRQIRLRRDSKEANARRQAGTRRRESLGKKAKRFLGRIVARNSRKMAFRAKSKSCHDLSVL

SEQ ID NO: 8132 - DNA, 1569 bp, Homo sapiens
ctggtgggggtggacagacacgtcagcccccgcagcagcgtggaccgggggcgggagcgggggcgggtggaggcttaaataggcggctctggagccagagcccagtgcgggctgagaaggcggtggctgcagcagcagcggcggcggaaaccctaaagtccgagtccggactacgagtgcgtggcctcctaatccggatcctagtcctgagcgtgtctgtgtgcgagtggacggtcccggacgcgatgaccctgaacggcggcggcagcggagcgggcgggagccgcggtgggggccaggagcgcgagcgccgtcggggcagcacaccctggggccccgccccgccgctgcaccgccgcagcatgccggtggacgagcgcgacctgcaggcggcgctgaccccgggtgccctgacggcggccgcggccgggacggggacccagggtcccaggctggactggcccgaggactccgaggactcgctcagctcagggggcagcgactcagacgagagcgtttacaaggtgctgctgctgggggcgcccggcgtgggcaagagcgccctggcgcgcatcttcggcggtgtggaggacgggcctgaagcagaggcagcagggcacacctatgatcgctccattgtagtggacggagaagaggcatcactcatggtctacgacatttgggagcaggacgggggccgctggttgcccggccactgcatggccatgggggatgcctatgtcattgtgtactcagtgacggacaagggcagcttcgagaaggcctcagaactgcgggtccagctgcggcgtgcacggcaaacagatgatgtgcccatcatcctcgtgggcaacaagagcgacctggtgcgctctcgtgaggtctcggtggatgagggccgggcctgcgcggtggtctttgactgcaagttcattgagacatcagcggcattgcaccacaatgtccaggcgctgtttgaaggtgtcgtgcgccagatacgcctgcgcagggacagcaaagaagccaacgcacgacggcaagcaggcacccggaggcgagagagccttggcaaaaaggcgaagcgcttcttgggccgcatcgtagctcgtaacagccgcaagatggcctttcgcgccaaatccaagtcctgccacgacctctcggttctctaggtcccacccgctcccactatggtgggagacgaacggaagggttggtgggctggcccagccaactgccccgggtgcctcagagcaggctcagactctgggtccctcggagctgccagccgggcacccccaacctcatggtcatggacagatagacagtgctgccctgcgaagtggctctcaggggccagtgagggctgggcccacagagatgcatgcgcaggctcatatgcgtcccaagcagccgcagcgcagccgccgggcaggcctgcgtgccgggagaggactctgccttttttcacagcccgggtgtgcctgccctggagggaggctcttcagtgcggtagctatttgtttacatgcagatttttgtaataaaggctatttcctgatagtcatg

SEQ ID NO: 8133 - protein, 308 aa, Homo sapiens; identical to SEQ ID NO: 1128

SEQ ID NO: 8134 - DNA, 519 bp, Homo sapiens
aaaataaaatactaagttgtccaacatagttctcattttcctgtgtttactactgtcgtactttgtttaaatatcaggcttcaaattatttcaataaatggatctccttttgagggccactgttttgggggctccttaaatgcaggcactctgcctactgggtgacgcagcagtgcccagtaccctcagtacaggagctggggtctctgtgttttcggggaggaccttgcaaattctcgagtggcagcttccatgggtggccactgttggaggggactcctcattcacccaccctttgtttactggtgcctgcctttccccacccacacaagatgcatgcgcaggctcatatgcgtcccaagcagccgcagcgcagccgccgggcaggcctgcgtgccgggagaggactctgccttttttcacagcccgggtgtgcctgccctggagggaggctcttcagtgcggtagctatttgtttacatgcagatttttgtaataaaggctatttcctgatagtca

SEQ ID NO: 8135 - protein, 118 aa, Homo sapiens
MQALCLLGDAAVPSTLSTGAGVSVFSGRTLQILEWQLPWVATVGGDSSFTHPLFTGACLSPPTQDACAGSYASQAAAAQPPGRPACRERTLPFFTARVCLPWREALQCGSYLFTCRFL

SEQ ID NO: 8136 - DNA, 750 bp, Homo sapiens
agcggaagcgcacgcctgctaggatcagcggtggtggttccgcgatggtaggcggcggcggggtcggcggcggcctcctggagaatgccaaccccctcatctaccagcgctctggggagcggcctgtgacggcaggcgaggaggacgagcagtgatatcgagcagctggtggagccgcatcccagcagggcgttcctggcagagggttctaagtgggcaagggcgcagagtcccttttccttcacttcccacatctgattcgctccatcaatgacccggagcatccactgacgctagaggagttgaacgtagtagagcaggtgcgggttcaggttagcgaccccgagagtacagtggctgtggctttcacaccaaccattccgcactgcagcatggccacccttattggtctgtccatcaaggtcaagcttctgcgctcccttcctcagcgtttcaagatggacgtgcacattactccggggacccatgcctcagagcatgcagtgaacaagcaacttgcagataaggagcgggtggcagctgccctggagaacacccacctcttggaggttgtgaatcagtgcctgtcagcccgctcctgagcctggcctttgacccctcagcctgcatactggtatcctggtcccagctcctgccagggctgttaccgttgttttcttgaatcactcacaatgagaaactaacattttgctttttgtaataaagttaatttatattcagttcccagca

SEQ ID NO: 8137 - protein, 69 aa, Homo sapiens
MATLIGLSIKVKLLRSLPQRFKMDVHITPGTHASEHAVNKQLADKERVAAALENTHLLEVVNQCLSARS

SEQ ID NO: 8138 - DNA, 691 bp, Homo sapiens
gggttggagcggaagcgcacgcctgctaggatcagcggtggtggttccgcgatggtaggcggcggcggggtcggcggcggcctcctggagaatgccaaccccctcatctaccagcgctctggggagcggcctgtgacggcaggcgaggaggacgagcaggttcccgacagcatcgacgcacgcgagatcttcgatctgattcgctccatcaatgacccggagcatccactgacgctagaggagttgaacgtagtagagcaggtgcgggttcaggttagcgaccccgagagtacagtggctgtggctttcacaccaaccattccgcactgcagcatggccacccttattggtctgtccatcaaggtcaagcttctgcgctcccttcctcagcgtttcaagatggacgtgcacattactccggggacccatgcctcagagcatgcagtgaacaagcaacttgcagataaggagcgggtggcagctgccctggagaacacccacctcttggaggttgtgaatcagtgcctgtcagcccgctcctgagcctggcctttgacccctcagcctgcatactggtatcctggtcccagctcctgccagggctgttaccgttgttttcttgaatcactcacaatgagaaactaacattttgctttttgtaataaagttaatttatattcagttcccagca

SEQ ID NO: 8139 - protein, 163 aa, Homo sapiens; identical to SEQ ID NO: 1130

SEQ ID NO: 8140 - DNA, 849 bp, Homo sapiens
gcgggttggagcggaagcgcacgcctgctaggatcagcggtggtggttccgcgatggtaggcggcggcggggtcggcggcggcctcctggagaatgccaaccccctcatctaccagcgctctggggagcggcctgtgacggcaggcgaggaggacgagcaggttcccgacagcatcgacgcacgcgagatcttcgatatccgccgctgctgggcgcgggcgggttccgggggcttgcggtggggggagcagtgatatcgagcagctggtggagccgcatcccagcagggcgttcctggcagagggttctaagtgggcaagggcgcagagtcccttttccttcacttcccacatctgattcgctccatcaatgacccggagcatccactgacgctagaggagttgaacgtagtagagcaggtgcgggttcaggttagcgaccccgagagtacagtggctgtggctttcacaccaaccattccgcactgcagcatggccacccttattggtctgtccatcaaggtcaagcttctgcgctcccttcctcagcgtttcaagatggacgtgcacattactccggggacccatgcctcagagcatgcagtgaacaagcaacttgcagataaggagcgggtggcagctgccctggagaacacccacctcttggaggttgtgaatcagtgcctgtcagcccgctcctgagcctggcctttgacccctcagcctgcatactggtatcctggtcccagctcctgccagggctgttaccgttgttttcttgaatcactcacaatgagaaactaacattttgctttttgtaataaagttaatttatattcagttcccagca

SEQ ID NO: 8141 - protein, 69 aa, Homo sapiens; identical to SEQ ID NO: 8137

SEQ ID NO: 8142 - DNA, 743 bp, Homo sapiens
cgcacgcctgctaggatcagcggtggtggttccgcgatggtaggcggcggcggggtcggcggcggcctcctggagaatgccaaccccctcatctaccagcgctctggggagcggcctgtgacggcaggcgaggaggacgagcaggttcccgacagcatcgacgcacgcgagatcttcgatctgattcgctccatcaatgacccggagcatccactgacgctagaggagttgaacgtagtagagcaggtgcgggttcaggttagcgaccccgagagtacagtggctgtggctttcacaccaaccattccgcactgcagcatggccacccttattggtctgtccatcaaggtcaagcttctgcgctcccttcctcagcgtttcaagatggacgtgcacattactccggggacccatgcctcagagcatgcaggaccagagtgtgtcaggcttcagcagcgcaggaggcagccagggggagggatcctaagaaggcagattagtgaacaagcaacttgcagataaggagcgggtggcagctgccctggagaacacccacctcttggaggttgtgaatcagtgcctgtcagcccgctcctgagcctggcctttgacccctcagcctgcatactggtatcctggtcccagctcctgccagggctgttaccgttgttttcttgaatcactcacaatgagaaactaacattttgctttttgtaataaagttaatttatattcagttccca

SEQ ID NO: 8143 - protein, 161 aa, Homo sapiens
MVGGGGVGGGLLENANPLIYQRSGERPVTAGEEDEQVPDSIDAREIFDLIRSINDPEHPLTLEELNVVEQVRVQVSDPESTVAVAFTPTIPHCSMATLIGLSIKVKLLRSLPQRFKMDVHITPGTHASEHAGPECVRLQQRRRQPGGGILRRQISEQATCR

SEQ ID NO: 8144 - DNA, 521 bp, Homo sapiens
cagtgatatcgagcagctggtggagccgcatcccagcagggcgttcctggcagagggttctaagtgggcaagggcgcagagtcccttttccttcacttcccacatctgattcgctccatcaatgacccggagcatccactgacgctagaggagttgaacgtagtagagcaggtgcgggttcaggttagcgaccccgagagtacagtggctgtggctttcacaccaaccattccgcactgcagcatggccacccttattggtctgtccatcaaggtcaagcttctgcgctcccttcctcagcgtttcaagatggacgtgcacattactccggggacccatgcctcagagcatgcagtgaacaagcaacttgcagataagcctggcctttgacccctcagcctgcatactggtatcctggtcccagctcctgccagggctgttaccgttgttttcttgaatcactcacaatgagaaactaacattttgctttttgtaataaagttaatttatattcagttccc

SEQ ID NO: 8145 - protein, 48 aa, Homo sapiens
MATLIGLSIKVKLLRSLPQRFKMDVHITPGTHASEHAVNKQLADKPGL

SEQ ID NO: 8146 - DNA, 451 bp, Homo sapiens
cagtgatatcgagcagctggtggagccgcatcccagcagggcgttcctggcagagggttctaagtgggcaagggcgcagagtcccttttccttcacttcccacatctgattcgctccatcaatgacccggagcatccactgacgctagaggagttgaacgtagtagagcaggtgcgggttcaggttagcgaccccgagagtacagtggctgtggctttcacaccaaccattccgcactgcagcatggccacccttattggtctgtccatcaaggtcaagcttctgcgctcccttcctcagcgtttcaaggtcagttggagctgagccccgggagtgagaccaggcattgagggtctactgctgaggatggggactgggagagcatgaacatggataggacatcagagtggggcctggaaggatccccattagcagagaggaaactgggagg

SEQ ID NO: 8147 - protein, 56 aa, Homo sapiens
SRCGFRLATPRVQWLWLSHQPFRTAAWPPLLVCPSRSSFCAPFLSVSRSVGAEPRE

SEQ ID NO: 8148 - DNA, 3948 bp, Homo sapiens
gtggcgtggcgacggagtcgcgcgagggacacgccgcgttgtgggttctcggcctgaggtgcgagagaagcggtgaccgcggccctggctgctcggacccgggaacatgatggtcgctggagcagaaggcgctgagaagggaccacggcggcgctgggtcgtgcgagccagtagcgggctgaaacgtagaggccagaaccaggtctcagggggcactaaaggcggtcggaggtaatccccacaccgcttcctcctggaagtcaggctggccgggagctcccgtatccaggacggttggtcgcctctggcctggcagggatcctagtgtctcgggacctcccggtgacgcgcctgcctcccctgctgcaccataggcccgggagtacggcgtccccacagcttggaccggcaggggctcgtgaaatgtttgtcaagtggataaatgaccatggccgtggtctccgcgggaggtgaggaaactgaaagccaccgaggaaaaggggggcgctccttaagaagtgccgcggtcacgtgtacgtttcaaaagaatggcgtgactgagtagggaggggaccgcggagaccctcagaccctggactgtaaggagatgaggggccgtgaaggggaacccaggaaactgagtcctgaaagcaaggaggaacttccagaatgaagggcgccgacactccttcctgcctttgctcaagcggttccttcaccccgatcaagttccttcccatttctccatctgggggatcctgaacgtgcacatcctcagagaagccctcctggggtctccaattctagtttattgccccctcctatcgatcccccagcgcgctcatcgggcctgtggacaaggacaggtttgaagagaggattccctggatcgcggaagggctgcaggaatggcacagccccttccgaggatgccaaaggagcccgggcaaaggaaagtggccgtgcccgggcctgcctaccactagatccccacccacctatgactgctcagtcccgctctcctaccacacccacctttcccggcccaagccagcgcaccccgctgactccctgcccagtccaaactccaaggctgggcaaggcactgatccactgctggacagacccggggcagcctctgggtgaacagcagcgtgtccgccggcagcgaaccgagaccagcgagccgaccatgcggctgcacagacttcgtgcgcggctgagcgcggtggcctgtgggcttctgctgcttcttgtccggggccagggccaggactcagccagtcccatccggaccacacacacggggcaggtgctggggagtcttgtccatgtgaagggcgccaatgccggggtccaaaccttcctgggaattccatttgccaagccacctctaggtccgctgcgatttgcaccccctgagccccctgaatcttggagtggtgtgagggatggaaccacccatccggccatgtgtctacaggacctcaccgcagtggagtcagagtttcttagccagttcaacatgaccttcccttccgactccatgtctgaggactgcctgtacctcagcatctacacgccggcccatagccatgaaggctctaacctgccggtgatggtgtggatccacggtggtgcgcttgtttttggcatggcttccttgtatgatggttccatgctggctgccttggagaacgtggtggtggtcatcatccagtaccgcctgggtgtcctgggcttcttcagcactggagacaagcacgcaaccggcaactggggctacctggaccaagtggctgcactacgctgggtccagcagaatatcgcccactttggaggcaaccctgaccgtgtcaccatttttggcgagtctgcgggtggcacgagtgtgtcttcgcttgttgtgtcccccatatcccaaggactcttccacggagccatcatggagagtggcgtggccctcctgcccggcctcattgccagctcagctgatgtcatctccacggtggtggccaacctgtctgcctgtgaccaagttgactctgaggccctggtgggctgcctgcggggcaagagtaaagaggagattcttgcaattaacaagcctttcaagatgatccccggagtggtggatggggtcttcctgcccaggcacccccaggagctgctggcctctgccgactttcagcctgtccctagcattgttggtgtcaacaacaatgaattcggctggctcatccccaaggtcatgaggatctatgatacccagaaggaaatggacagagaggcctcccaggctgctctgcagaaaatgttaacgctgctgatgttgcctcctacatttggtgacctgctgagggaggagtacattggggacaatggggatccccagaccctccaagcgcagttccaggagatgatggcggactccatgtttgtgatccctgcactccaagtagcacattttcagtgttcccgggcccctgtgtacttctacgagttccagcatcagcccagctggctcaagaacatcaggccaccgcacatgaaggcagaccatggtgatgagcttccttttgttttcagaagtttctttgggggcaactacattaaattcactgaggaagaggagcagctaagcaggaagatgatgaagtactgggccaactttgcgagaaatgggaaccccaatggcgagggtctgccacactggccgctgttcgaccaggaggagcaatacctgcagctgaacctacagcctgcggtgggccgggctctgaaggcccacaggctccagttctggaagaaggcgctgccccaaaagatccaggagctcgaggagcctgaagagagacacacagagctgtagctccctgtgccggggaggagggggtgggttcgctgacaggcgagggtcagcctgctgtgcccacacacacccactaaggagaaagaagttgattccttcattcacttcgccattcattcatacttccgtccatccattcagaaagcatttattaagaatttactcaggcatgatggcccatacttgtaatcccagctattgggaaggatgagatgggaggatggcttgaggccagaggtttgagaccgaccagccagggcaacacagtgagaccccttctcaaaaaaaaaaaaaaaaaagagagagtgtgtgattagaagctaaataggaaagttttgagcttcaagtcagtgaggagtaaaaaagatttttaaaaagcaaagaaaacaaaatataagggaaaaatatgagaaaaataaaaataaaaagagaataataggccaggcactgtggctcatgcccctaatcccagcacttttgggaggtcaaggtgagcagaacacctgaggacaggagtttgagaccagcctgcccaacgtggtgaaaccccatctctatgaaaaatacaaaaatcagacgggcacagtggtggtgcccacctgtgatcccagctactcaggaggctgaggcaggagaattacttgaacctgggaggcagaggttgcagtgagctgagattgtgccactgtactccagcctgggcaacaagagcgagactccgtttccaaaaaaataagagagaatagaagaagctactgcatgatgttagttaccaagcctgccatgggtcctctcttgctagacacactccatagatccccccactgagctgtggatgggcaaaccccggtggaatcccaccctccccaacaccccactgagccctgggccccctcctcccttcctcacctccaccttctccctgccttctctcttctctcgtctgagcccccaggccttttccactttgagggaggtgcttcgaagaatgttgcccacacctaagtgttagaagcctatgtccgttcatccctgagaggtctgaaagaataaaaataaattctaaaaaaagcctc

SEQ ID NO: 8149 - protein, 623 aa, Homo sapiens; identical to SEQ ID NO: 1132

SEQ ID NO: 8150 - DNA, 3900 bp, Homo sapiens
gtggcgtggcgacggagtcgcgcgagggacacgccgcgttgtgggttctcggcctgaggtgcgagagaagcggtgaccgcggccctggctgctcggacccgggaacatgatggtcgctggagcagaaggcgctgagaagggaccacggcggcgctgggtcgtgcgagccagtagcgggctgaaacgtagaggccagaaccaggtctcagggggcactaaaggcggtcggaggtaatccccacaccgcttcctcctggaagtcaggctggccgggagctcccgtatccaggacggttggtcgcctctggcctggcagggatcctagtgtctcgggacctcccggtgacgcgcctgcctcccctgctgcaccataggcccgggagtacggcgtccccacagcttggaccggcaggggctcgtgaaatgtttgtcaagtggataaatgaccatggccgtggtctccgcgggaggtgaggaaactgaaagccaccgaggaaaaggggggcgctccttaagaagtgccgcggtcacgtgtacgtttcaaaagaatggcgtgactgagtagggaggggaccgcggagaccctcagaccctggactgtaaggagatgaggggccgtgaaggggaacccaggaaactgagtcctgaaagcaaggaggaacttccagaatgaagggcgccgacactccttcctgcctttgctcaagcggttccttcaccccgatcaagttccttcccatttctccatctgggggatcctgaacgtgcacatcctcagagaagccctcctggggtctccaattctagtttattgccccctcctatcgatcccccagcgcgctcatcgggcctgtggacaaggacaggtttgaagagaggattccctggatcgcggaagggctgcaggaatggcacagccccttccgaggatgccaaaggagcccgggcaaaggaaagtggccgtgcccgggcctgcctaccactagatccccacccacctatgactgctcagtcccgctctcctaccacacccacctttcccggcccaagccagcgcaccccgctgactccctgcccagtccaaactccaaggctgggcaaggcactgatccactgctggacagacccggggcagcctctgggtgaacagcagcgtgtccgccggcagcgaaccgagaccagcgagccgaccatgcggctgcacagacttcgtgcgcggctgagcgcggtggcctgtgggcttctgctgcttcttgtccggggccagggccaggactcagccagtcccatccggaccacacacacggggcaggtgctggggagtcttgtccatgtgaagggcgccaatgccggggtccaaaccttcctgggaattccatttgccaagccacctctaggtccgctgcgatttgcaccccctgagccccctgaatcttggagtggtgtgagggatggaaccacccatccggccatgtgtctacaggacctcaccgcagtggagtcagagtttcttagccagttcaacatgaccttcccttccgactccatgtctgaggactgcctgtacctcagcatctacacgccggcccatagccatgaaggctctaacctgccggtgatggtgtggatccacggtggtgcgcttgtttttggcatggcttccttgtatgatggttccatgctggctgccttggagaacgtggtggtggtcatcatccagtaccgcctgggtgtcctgggcttcttcagcactggagacaagcacgcaaccggcaactggggctacctggaccaagtggctgcactacgctgggtccagcagaatatcgcccactttggaggcaaccctgaccgtgtcaccatttttggcgagtctgcgggtggcacgagtgtgtcttcgcttgttgtgtcccccatatcccaaggactcttccacggagccatcatggagagtggcgtggccctcctgcccggcctcattgccagctcagctgatgtcatctccacggtggtggccaacctgtctgcctgtgaccaagttgactctgaggccctggtgggctgcctgcggggcaagagtaaagaggagattcttgcaattaacaagcctttcaagatgatccccggagtggtggatggggtcttcctgcccaggcacccccaggagctgctggcctctgccgactttcagcctgtccctagcattgttggtgtcaacaacaatgaattcggctggctcatccccaaggtcatgaggatctatgatacccagaaggaaatggacagagaggcctcccaggctgctctgcagaaaatgttaacgctgctgatgttgcctcctacatttggtgacctgctgagggaggagtacattggggacaatggggatccccagaccctccaagcgcagttccaggagatgatggcggactccatgtttgtgatccctgcactccaagtagcacattttcagtgttcccgggcccctgtgtacttctacgagttccagcatcagcccagctggctcaagaacatcaggccaccgcacatgaaggcagaccatgttaaattcactgaggaagaggagcagctaagcaggaagatgatgaagtactgggccaactttgcgagaaatgggaaccccaatggcgagggtctgccacactggccgctgttcgaccaggaggagcaatacctgcagctgaacctacagcctgcggtgggccgggctctgaaggcccacaggctccagttctggaagaaggcgctgccccaaaagatccaggagctcgaggagcctgaagagagacacacagagctgtagctccctgtgccggggaggagggggtgggttcgctgacaggcgagggtcagcctgctgtgcccacacacacccactaaggagaaagaagttgattccttcattcacttcgccattcattcatacttccgtccatccattcagaaagcatttattaagaatttactcaggcatgatggcccatacttgtaatcccagctattgggaaggatgagatgggaggatggcttgaggccagaggtttgagaccgaccagccagggcaacacagtgagaccccttctcaaaaaaaaaaaaaaaaaagagagagtgtgtgattagaagctaaataggaaagttttgagcttcaagtcagtgaggagtaaaaaagatttttaaaaagcaaagaaaacaaaatataagggaaaaatatgagaaaaataaaaataaaaagagaataataggccaggcactgtggctcatgcccctaatcccagcacttttgggaggtcaaggtgagcagaacacctgaggacaggagtttgagaccagcctgcccaacgtggtgaaaccccatctctatgaaaaatacaaaaatcagacgggcacagtggtggtgcccacctgtgatcccagctactcaggaggctgaggcaggagaattacttgaacctgggaggcagaggttgcagtgagctgagattgtgccactgtactccagcctgggcaacaagagcgagactccgtttccaaaaaaataagagagaatagaagaagctactgcatgatgttagttaccaagcctgccatgggtcctctcttgctagacacactccatagatccccccactgagctgtggatgggcaaaccccggtggaatcccaccctccccaacaccccactgagccctgggccccctcctcccttcctcacctccaccttctccctgccttctctcttctctcgtctgagcccccaggccttttccactttgagggaggtgcttcgaagaatgttgcccacacctaagtgttagaagcctatgtccgttcatccctgagaggtctgaaagaataaaaataaattctaaaaaaagcctc

SEQ ID NO: 8151 - protein, 607 aa, Homo sapiens; identical to SEQ ID NO: 1134

SEQ ID NO: 8152 - DNA, 2963 bp, Homo sapiens
gcgacggagtcgcgcgagggacacgccgcgttgtgggttctcggcctgaggtgcgagagaagcggtgaccgcggccctggctgctcggacccgggaacatgatggtcgctggagcagaaggcgctgagaagggaccacggcggcgctgggtcgtgcgagccagtagcgggctgaaacgtagaggccagaaccaggtctcagggggcactaaaggcggtcggaggtaatccccacaccgcttcctcctggaagtcaggctggccgggagctcccgtatccaggacggttggtcgcctctggcctggcagggatcctagtgtctcgggacctcccggtgacgcgcctgcctcccctgctgcaccataggcccgggagtacggcgtccccacagcttggaccggcaggggctcgtgaaatgtttgtcaagtggataaatgaccatggccgtggtctccgcgggaggtgaggaaactgaaagccaccgaggaaaaggggggcgctccttaagaagtgccgcggtcacgtgtacgtttcaaaagaatggcgtgactgagtagggaggggaccgcggagaccctcagaccctggactgtaaggagatgaggggccgtgaaggggaacccaggaaactgagtcctgaaagcaaggaggaacttccagaatgaagggcgccgacactccttcctgcctttgctcaagcggttccttcaccccgatcaagttccttcccatttctccatctgggggatcctgaacgtgcacatcctcagagaagccctcctggggtctccaattctagtttattgccccctcctatcgatcccccagcgcgctcatcgggcctgtggacaaggacaggtttgaagagaggattccctggatcgcggaagggctgcaggaatggcacagccccttccgaggatgccaaaggagcccgggcaaaggaaagtggccgtgcccgggcctgcctaccactagatccccacccacctatgactgctcagtcccgctctcctaccacacccacctttcccggcccaagccagcgcaccccgctgactccctgcccagtccaaactccaaggctgggcaaggcactgatccactgctggacagacccggggcagcctctgggtgaacagcagcgtgtccgccggcagcgaaccgagaccagcgagccgaccatgcggctgcacagacttcgtgcgcggctgagcgcggtggcctgtgggcttctgctgcttcttgtccggggccagggccaggactcagccagtcccatccggaccacacacacggggcaggtgctggggagtcttgtccatgtgaagggcgccaatgccggggtccaaaccttcctgggaattccatttgccaagccacctctaggtccgctgcgatttgcaccccctgagccccctgaatcttggagtggtgtgagggatggaaccacccatccggccatgtgtctacaggacctcaccgcagtggagtcagagtttcttagccagttcaacatgaccttcccttccgactccatgtctgaggactgcctgtacctcagcatctacacgccggcccatagccatgaaggctctaacctgccggtgatggtgtggatccacggtggtgcgcttgtttttggcatggcttccttgtatgatggttccatgctggctgccttggagaacgtggtggtggtcatcatccagtaccgcctgggtgtcctgggcttcttcagcactggagacaagcacgcaaccggcaactggggctacctggaccaagtggctgcactacgctgggtccagcagaatatcgcccactttggaggcaaccctgaccgtgtcaccatttttggcgagtctgcgggtggcacgagtgtgtcttcgcttgttgtgtcccccatatcccaaggactcttccacggagccatcatggagagtggcgtggccctcctgcccggcctcattgccagctcagctgatgtcatctccacggtggtggccaacctgtctgcctgtgaccaagttgactctgaggccctggtgggctgcctgcggggcaagagtaaagaggagattcttgcaattaacaagcctttcaagatgatccccggagtggtggatggggtcttcctgcccaggcacccccaggagctgctggcctctgccgactttcagcctgtccctagcattgttggtgtcaacaacaatgaattcggctggctcatccccaaggtcatgaggatctatgatacccagaaggaaatggacagagaggcctcccaggctgctctgcagaaaatgttaacgctgctgatgttgcctcctacatttggtgacctgctgagggaggagtacattggggacaatggggatccccagaccctccaagcgcagttccaggagatgatggcggactccatgtttgtgatccctgcactccaagtagcacattttcagtgttcccgggcccctgtgtacttctacgagttccagcatcagcccagctggctcaagaacatcaggccaccgcacatgaaggcagaccatggtgatgagcttccttttgttttcagaagtttctttgggggcaactacattaaattcactgaggaagaggagcagctaagcaggaagatgatgaagtactgggccaactttgcgagaaatgggaaccccaatggcgagggtctgccacactggccgctgttcgaccaggaggagcaatacctgcagctgaacctacagcctgcggtgggccgggctctgaaggcccacaggctccagttctggaagaaggcgctgccccaaaagatccaggagctcgaggagcctgaagagagacacacagagctgtagctccctgtgccggggaggagggggtgggttcgctgacaggcgagggtcagcctgctgtgcccacacacacccactaaggagaaagaagttgattccttc

SEQ ID NO: 8153 - protein, 623 aa, Homo sapiens; identical to SEQ ID NO: 1132

SEQ ID NO: 8154 - DNA, 2917 bp, Homo sapiens
gcgacggagtcgcgcgagggacacgccgcgttgtgggttctcggcctgaggtgcgagagaagcggtgaccgcggccctggctgctcggacccgggaacatgatggtcgctggagcagaaggcgctgagaagggaccacggcggcgctgggtcgtgcgagccagtagcgggctgaaacgtagaggccagaaccaggtctcagggggcactaaaggcggtcggaggtaatccccacaccgcttcctcctggaagtcaggctggccgggagctcccgtatccaggacggttggtcgcctctggcctggcagggatcctagtgtctcgggacctcccggtgacgcgcctgcctcccctgctgcaccataggcccgggagtacggcgtccccacagcttggaccggcaggggctcgtgaaatgtttgtcaagtggataaatgaccatggccgtggtctccgcgggaggtgaggaaactgaaagccaccgaggaaaaggggggcgctccttaagaagtgccgcggtcacgtgtacgtttcaaaagaatggcgtgactgagtagggaggggaccgcggagaccctcagaccctggactgtaaggagatgaggggccgtgaaggggaacccaggaaactgagtcctgaaagcaaggaggaacttccagaatgaagggcgccgacactccttcctgcctttgctcaagcggttccttcaccccgatcaagttccttcccatttctccatctgggggatcctgaacgtgcacatcctcagagaagccctcctggggtctccaattctagtttattgccccctcctatcgatcccccagcgcgctcatcgggcctgtggacaaggacaggtttgaagagaggattccctggatcgcggaagggctgcaggaatggcacagccccttccgaggatgccaaaggagcccgggcaaaggaaagtggccgtgcccgggcctgcctaccactagatccccacccacctatgactgctcagtcccgctctcctaccacacccacctttcccggcccaagccagcgcaccccgctgactccctgcccagtccaaactccaaggctgggcaaggcactgatccactgctggacagacccggggcagcctctgggtgaacagcagcgtgtccgccggcagcgaaccgagaccagcgagccgaccatgcggctgcacagacttcgtgcgcggctgagcgcggtggcctgtgggcttctgctgcttcttgtccggggccagggccaggactcagccagtcccatccggaccacacacacggggcaggtgctggggagtcttgtccatgtgaagggcgccaatgccggggtccaaaccttcctgggaattccatttgccaagccacctctaggtccgctgcgatttgcaccccctgagccccctgaatcttggagtggtgtgagggatggaaccacccatccggccatgtgtctacaggacctcaccgcagtggagtcagagtttcttagccagttcaacatgaccttcccttccgactccatgtctgaggactgcctgtacctcagcatctacacgccggcccatagccatgaaggctctaacctgccggtgatggtgtggatccacggtggtgcgcttgtttttggcatggcttccttgtatgatggttccatgctggctgccttggagaacgtggtggtggtcatcatccagtaccgcctgggtgtcctgggcttcttcagcactggagacaagcacgcaaccggcaactggggctacctggaccaagtggctgcactacgctgggtccagcagaatatcgcccactttggaggcaaccctgaccgtgtcaccatttttggcgagtctgcgggtggcacgagtgtgtcttcgcttgttgtgtcccccatatcccaaggactcttccacggagccatcatggagagtggcgtggccctcctgcccggcctcattgccagctcagctgatgtcatctccacggtggtggccaacctgtctgcctgtgaccaagttgactctgaggccctggtgggctgcctgcggggcaagagtaaagaggagattcttgcaattaacaagcctttcaagatgatccccggagtggtggatggggtcttcctgcccaggcacccccaggagctgctggcctctgccgactttcagcctgtccctagcattgttggtgtcaacaacaatgaattcggctggctcatccccaaggtcatgaggatctatgatacccagaaggaaatggacagagaggcctcccaggctgctctgcagaaaatgttaacgctgctgatgttgcctcctacatttggtgacctgctgagggaggagtacattggggacaatggggatccccagaccctccaagcgcagttccaggagatgatggcggactccatgtttgtgatccctgcactccaagtagcacattttcagtgttcccgggcccctgtgtacttctacgagttccagcatcagcccagctggctcaagaacatcaggccaccgcacatgaaggcagaccatgttaaattcactgaggaagaggagcagctaagcaggaagatgatgaagtactgggccaactttgcgagaaatgggaaccccaatggcgagggtctgccacactggccgctgttcgaccaggaggagcaatacctgcagctgaacctacagcctgcggtgggccgggctctgaaggcccacaggctccagttctggaagaaggcgctgccccaaaagatccaggagctcgaggagcctgaagagagacacacagagctgtagctccctgtgccggggaggagggggtgggttcgctgacaggcgagggtcagcctgctgtgcccacacacacccactaaggagaaagaagttgattccttcat

SEQ ID NO: 8155 - protein, 607 aa, Homo sapiens; identical to SEQ ID NO: 1134

SEQ ID NO: 8156 - DNA, 4205 bp, Homo sapiens
gcgacggagtcgcgcgagggacacgccgcgttgtgggttctcggcctgaggtgcgagagaagcggtgaccgcggccctggctgctcggacccgggaacatgatggtcgctggagcagaaggcgctgagaagggaccacggcggcgctgggtcgtgcgagccagtagcgggctgaaacgtagaggccagaaccaggtctcagggggcactaaaggcggtcggaggtaatccccacaccgcttcctcctggaagtcaggctggccgggagctcccgtatccaggacggttggtcgcctctggcctggcagggatcctagtgtctcgggacctcccggtgacgcgcctgcctcccctgctgcaccataggcccgggagtacggcgtccccacagcttggaccggcaggggctcgtgaaatgtttgtcaagtggataaatgaccatggccgtggtctccgcgggaggtgaggaaactgaaagccaccgaggaaaaggggggcgctccttaagaagtgccgcggtcacgtgtacgtttcaaaagaatggcgtgactgagtagggaggggaccgcggagaccctcagaccctggactgtaaggagatgaggggccgtgaaggggaacccaggaaactgagtcctgaaagcaaggaggaacttccagaatgaagggcgccgacactccttcctgcctttgctcaagcggttccttcaccccgatcaagttccttcccatttctccatctgggggatcctgaacgtgcacatcctcagagaagccctcctggggtctccaattctagtttattgccccctcctatcgatcccccagcgcgctcatcgggcctgtggacaaggacaggtttgaagagaggattccctggatcgcggaagggctgcaggaatggcacagccccttccgaggatgccaaaggagcccgggcaaaggaaagtggccgtgcccgggcctgcctaccactagatccccacccacctatgactgctcagtcccgctctcctaccacacccacctttcccggcccaagccagcgcaccccgctgactccctgcccagtccaaactccaaggctgggcaaggcactgatccactgctggacagacccggggcagcctctgggtgaacagcagcgtgtccgccggcagcgaaccgagaccagcgagccgaccatgcggctgcacagacttcgtgcgcggctgagcgcggtggcctgtgggcttctgctgcttcttgtccggggccagggtgaggctccctcggaggggcgacagggaccgggctcagatctgccaaatgctgcggaggcagaacctgacagtgcgggagggcaggcgcctgggaggtaggagctggtggagatgacagcgtggaactcgtgagccccacgcaacgcctccccgccgcccaaggtgggctcctagaagcacagaaagggtcgggctgggggacaccacggcaaggaaccagcggagtacaggggccccaggagcgccgggacatgccaggccgggccaggactcagccagtcccatccggaccacacacacggggcaggtgctggggagtcttgtccatgtgaagggcgccaatgccggggtccaaaccttcctgggaattccatttgccaagccacctctaggtccgctgcgatttgcaccccctgagccccctgaatcttggagtggtgtgagggatggaaccacccatccggccatgtgtctacaggacctcaccgcagtggagtcagagtttcttagccagttcaacatgaccttcccttccgactccatgtctgaggactgcctgtacctcagcatctacacgccggcccatagccatgaaggctctaacctgccggtgatggtgtggatccacggtggtgcgcttgtttttggcatggcttccttgtatgatggttccatgctggctgccttggagaacgtggtggtggtcatcatccagtaccgcctgggtgtcctgggcttcttcagcactggagacaagcacgcaaccggcaactggggctacctggaccaagtggctgcactacgctgggtccagcagaatatcgcccactttggaggcaaccctgaccgtgtcaccatttttggcgagtctgcgggtggcacgagtgtgtcttcgcttgttgtgtcccccatatcccaaggactcttccacggagccatcatggagagtggcgtggccctcctgcccggcctcattgccagctcagctgatgtcatctccacggtggtggccaacctgtctgcctgtgaccaagttgactctgaggccctggtgggctgcctgcggggcaagagtaaagaggagattcttgcaattaacaagcctttcaagatgatccccggagtggtggatggggtcttcctgcccaggcacccccaggagctgctggcctctgccgactttcagcctgtccctagcattgttggtgtcaacaacaatgaattcggctggctcatccccaaggtcatgaggatctatgatacccagaaggaaatggacagagaggcctcccaggctgctctgcagaaaatgttaacgctgctgatgttgcctcctacatttggtgacctgctgagggaggagtacattggggacaatggggatccccagaccctccaagcgcagttccaggagatgatggcggactccatgtttgtgatccctgcactccaagtagcacattttcagtgttcccgggcccctgtgtacttctacgagttccagcatcagcccagctggctcaagaacatcaggccaccgcacatgaaggcagaccatggtgatgagcttccttttgttttcagaagtttctttgggggcaactacattaaattcactgaggaagaggagcagctaagcaggaagatgatgaagtactgggccaactttgcgagaaatgggaaccccaatggcgagggtctgccacactggccgctgttcgaccaggaggagcaatacctgcagctgaacctacagcctgcggtgggccgggctctgaaggcccacaggctccagttctggaagaaggcgctgccccaaaagatccaggagctcgaggagcctgaagagagacacacagagctgtagctccctgtgccggggaggagggggtgggttcgctgacaggcgagggtcagcctgctgtgcccacacacacccactaaggagaaagaagttgattccttcattcacttcgccattcattcatacttccgtccatccattcagaaagcatttattaagaatttactcaggcatgatggcccatacttgtaatcccagctattgggaaggatgagatgggaggatggcttgaggccagaggtttgagaccgaccagccagggcaacacagtgagaccccttctcaaaaaaaaaaaaaaaaaagagagagtgtgtgattagaagctaaataggaaagttttgagcttcaagtcagtgaggagtaaaaaagatttttaaaaagcaaagaaaacaaaatataagggaaaaatatgagaaaaataaaaataaaaagagaataataggccaggcactgtggctcatgcccctaatcccagcacttttgggaggtcaaggtgagcagaacacctgaggacaggagtttgagaccagcctgcccaacgtggtgaaaccccatctctatgaaaaatacaaaaatcagacgggcacagtggtggtgcccacctgtgatcccagctactcaggaggctgaggcaggagaattacttgaacctgggaggcagaggttgcagtgagctgagattgtgccactgtactccagcctgggcaacaagagcgagactccgtttccaaaaaaataagagagaatagaagaagctactgcatgatgttagttaccaagcctgccatgggtcctctcttgctagacacactccatagatccccccactgagctgtggatgggcaaaccccggtggaatcccaccctccccaacaccccactgagccctgggccccctcctcccttcctcacctccaccttctccctgccttctctcttctctcgtctgagcccccaggccttttccactttgagggaggtgcttcgaagaatgttgcccacacctaagtgttagaagcctatgtccgttcatccctgagaggtctgaaagaataaaaataaattctaaaaaaagcctc

SEQ ID NO: 8157 - protein, 466 aa, Homo sapiens
MCLQDLTAVESEFLSQFNMTFPSDSMSEDCLYLSIYTPAHSHEGSNLPVMVWIHGGALVFGMASLYDGSMLAALENVVVVIIQYRLGVLGFFSTGDKHATGNWGYLDQVAALRWVQQNIAHFGGNPDRVTIFGESAGGTSVSSLVVSPISQGLFHGAIMESGVALLPGLIASSADVISTVVANLSACDQVDSEALVGCLRGKSKEEILAINKPFKMIPGVVDGVFLPRHPQELLASADFQPVPSIVGVNNNEFGWLIPKVMRIYDTQKEMDREASQAALQKMLTLLMLPPTFGDLLREEYIGDNGDPQTLQAQFQEMMADSMFVIPALQVAHFQCSRAPVYFYEFQHQPSWLKNIRPPHMKADHGDELPFVFRSFFGGNYIKFTEEEEQLSRKMMKYWANFARNGNPNGEGLPHWPLFDQEEQYLQLNLQPAVGRALKAHRLQFWKKALPQKIQELEEPEERHTEL

SEQ ID NO: 8158 - DNA, 1127 bp, Homo sapiens
cgccgcgttgtgggttctcggcctgaggtgcgagagaagcggtgaccgcggccctggctgctcggacccgggaacatgatggtcgctggagcagaaggcgctgagaagggaccacggcggcgctgggtcgtgcgagccagtagcgggctgaaacgtagaggccagaaccaggtctcagggggcactaaaggcggtcggaggcccgggagtacggcgtccccacagcttggaccggcaggggctcgtgaaatgtttgtcaagtggataaatgaccatggccgtggtctccgcgggaggtgaggaaactgaaagccaccgaggaaaaggggggcgctccttaagaagtgccgcggtcacgtgtacgtttcaaaagaatggcgtgactgagtagggaggggaccgcggagaccctcagaccctggactgtaaggagatgaggggccgtgaaggggaacccaggaaactgagtcctgaaagcaaggaggaacttccagaatgaagggcgccgacactccttcctgcctttgctcaagcggttccttcaccccgatcaagttccttcccatttctccatctgggggatcctgaacgtgcacatcctcagagaagccctcctggggtctccaattctagtttattgccccctcctatcgatcccccagcgcgctcatcgggcctgtggacaaggacaggtttgaagagaggattccctggatcgcggaagggctgcaggaatggcacagccccttccgaggatgccaaaggagcccgggcaaaggaaagtggccgtgcccgggcctgcctaccactagatccccacccacctatgactgctcagtcccgctctcctaccacacccacctttcccggcccaagccagcgcaccccgctgactccctgcccagtccaaactccaaggctgggcaaggcactgatccactgctggacagacccggggcagcctctgggtgaacagcagcgtgtccgccggcagcgaaccgagaccagcgagccgaccatgcggctgcacagacttcgtgcgcggctgagcgcggtggcctgtgggcttctgctgcttcttgtccggggccagggtgaggctccctcggaggggcgacagggaccgg

SEQ ID NO: 8159 - protein, 74 aa, Homo sapiens
MMVAGAEGAEKGPRRRWVVRASSGLKRRGQNQVSGGTKGGRRPGSTASPQLGPAGAREMFVKWINDHGRGLRGR

SEQ ID NO: 8160 - DNA, 1361 bp, Homo sapiens
caccgcttcctcctggaagtcaggctggccgggagctcccgtatccaggacggttggtcgcctctggcctggcagggatcctagtgtctcgggacctcccggtgacgcgcctgcctcccctgctgcaccataggcccgggagtacggcgtccccacagcttggaccggcaggggctcgtgaaatgtttgtcaagtggataaatgaccatggccgtggtctccgcgggaggtgaggaaactgaaagccaccgaggaaaaggggggcgctccttaagaagtgccgcggtcacgtgtacgtttcaaaagaatggcgtgactgagtagggaggggaccgcggagaccctcagaccctggactgtaaggagatgaggggccgtgaaggggaacccaggaaactgagtcctgaaagcaaggaggaacttccagaatgaagggcgccgacactccttcctgcctttgctcaagcggttccttcaccccgatcaagttccttcccatttctccatctgggggatcctgaacgtgcacatcctcagagaagccctcctggggtctccaattctagtttattgccccctcctatcgatcccccagcgcgctcatcgggcctgtggacaaggacaggtttgaagagaggattccctggatcgcggaagggctgcaggaatggcacagccccttccgaggatgccaaaggagcccgggcaaaggaaagtggccgtgcccgggcctgcctaccactagatccccacccacctatgactgctcagtcccgctctcctaccacacccacctttcccggcccaagccagcgcaccccgctgactccctgcccagtccaaactccaaggctgggcaaggcactgatccactgctggacagacccggggcagcctctgggtgaacagcagcgtgtccgccggcagcgaaccgagaccagcgagccgaccatgcggctgcacagacttcgtgcgcggctgagcgcggtggcctgtgggcttctgctgcttcttgtccggggccagggccaggactcagccagtcccatccggaccacacacacggggcaggtgctggggagtcttgtccatgtgaagggcgccaatgccggggtccaaaccttcctgggaattccatttgccaagccacctctaggtccgctgcgatttgcaccccctgagccccctcctcccttcctcacctccaccttctccctgccttctctcttctctcgtctgagcccccaggccttttccactttgagggaggtgcttcgaagaatgttgcccacacctaagtgttagaagcctatgtccgttcatccctgagaggtctgaaagaataaaaataaattctaaaa

SEQ ID NO: 8161 - protein, 181 aa, Homo sapiens
MTAQSRSPTTPTFPGPSQRTPLTPCPVQTPRLGKALIHCWTDPGQPLGEQQRVRRQRTETSEPTMRLHRLRARLSAVACGLLLLLVRGQGQDSASPIRTTHTGQVLGSLVHVKGANAGVQTFLGIPFAKPPLGPLRFAPPEPPPPFLTSTFSLPSLFSRLSPQAFSTLREVLRRMLPTPKC

SEQ ID NO: 8162 - DNA, 2064 bp, Homo sapiens
tcaacaacaatgaattcggctggctcatccccaaggtgagccccaacccaagcccacaagtgcctggggagcccatctggtagtggggggtgttcagggcttcatagctccaggctcatcccatccccagctacagactctctcctggccatccaggtcatgaggatctatgatacccagaaggaaatggacagagaggcctcccaggctgctctgcagaaaatgttaacgctgctggtaaggctcctggggtccctcgccaatggagacgggctcctctcctgtcctgagacagaggaaattcaacccccagatacccttcctatgtagtgacccccatgagcaaaggcctgggtgtgtgtgtttaggggtggggtcacctcagagcctcgcctttgctcccccttcctgtgccatccccaagcccgagaccacctcctccctgcccctggcatccagtctaacctgcctcttcctgatccacctggggtagatgttgcctcctacatttggtgacctgctgagggaggagtacattggggacaatggggatccccagaccctccaagcgcagttccaggagatgatggcggactccatgtttgtgatccctgcactccaagtagcacattttcagtgttcccgggcccctgtgtacttctacgagttccagcatcagcccagctggctcaagaacatcaggccaccgcacatgaaggcagaccatgttaaattcactgaggaagaggagcagctaagcaggaagatgatgaagtactgggccaactttgcgagaaatgggaaccccaatggcgagggtctgccacactggccgctgttcgaccaggaggagcaatacctgcagctgaacctacagcctgcggtgggccgggctctgaaggcccacaggctccagttctggaagaaggcgctgccccaaaagatccaggagctcgaggagcctgaagagagacacacagagctgtagctccctgtgccggggaggagggggtgggttcgctgacaggcgagggtcagcctgctgtgcccacacacacccactaaggagaaagaagttgattccttcattcacttcgccattcattcatacttccgtccatccattcagaaagcatttattaagaatttactcaggcatgatggcccatacttgtaatcccagctattgggaaggatgagatgggaggatggcttgaggccagaggtttgagaccgaccagccagggcaacacagtgagaccccttctcaaaaaaaaaaaaaaaaaagagagagtgtgtgattagaagctaaataggaaagttttgagcttcaagtcagtgaggagtaaaaaagatttttaaaaagcaaagaaaacaaaatataagggaaaaatatgagaaaaataaaaataaaaagagaataataggccaggcactgtggctcatgcccctaatcccagcacttttgggaggtcaaggtgagcagaacacctgaggacaggagtttgagaccagcctgcccaacgtggtgaaaccccatctctatgaaaaatacaaaaatcagacgggcacagtggtggtgcccacctgtgatcccagctactcaggaggctgaggcaggagaattacttgaacctgggaggcagaggttgcagtgagctgagattgtgccactgtactccagcctgggcaacaagagcgagactccgtttccaaaaaaataagagagaatagaagaagctactgcatgatgttagttaccaagcctgccatgggtcctctcttgctagacacactccatagatccccccactgagctgtggatgggcaaaccccggtggaatcccaccctccccaacaccccactgagccctgggccccctcctcccttcctcacctccaccttctccctgccttctctcttctctcgtctgagcccccaggccttttccactttgagggaggtgcttcgaagaatgttgcccacacctaagtgttagaagcctatgtccgttcatccctgagaggtctgaaagaataaaaataaattctaaaaaaagcctc

SEQ ID NO: 8163 - protein, 164 aa, Homo sapiens
MLPPTFGDLLREEYIGDNGDPQTLQAQFQEMMADSMFVIPALQVAHFQCSRAPVYFYEFQHQPSWLKNIRPPHMKADHVKFTEEEEQLSRKMMKYWANFARNGNPNGEGLPHWPLFDQEEQYLQLNLQPAVGRALKAHRLQFWKKALPQKIQELEEPEERHTEL

SEQ ID NO: 8164 - DNA, 523 bp, Homo sapiens
tgcactccaagtagcacattttcagtgttcccgggcccctgtgtacttctacgagttccagcatcagcccagctggctcaagaacatcaggccaccgcacatgaaggcagaccatggtgatgagcttccttttgttttcagaagtttctttgggggcaactacattaaattcactgaggaagaggagcagctaagcaggaagatgatgaagtactgggccaactttgcgagaaatgggaaccccaatggcgagggtctgccacactggccgctgttcgaccaggaggagcaatacctgcagctgaacctacagcctgcggtgggccgggctctgaaggcccacaggctccagttctggaagaaggcgctgccccaaaagatccaggagctcgaggagcctgaagagagacacacagagctgtagctccctgtgccggggaggagggggtgggttcgctgacaggcgagggtcagcctgctgtgcccacacacacccactaaggagaaagaagttgattccttc

SEQ ID NO: 8165 - protein, 107 aa, Homo sapiens [sequence omitted]

SEQ ID NO: 8166 - DNA, 1500 bp, Homo sapiens
tgcactccaagtagcacattttcagtgttcccgggcccctgtgtacttctacgagttccagcatcagcccagctggctcaagaacatcaggccaccgcacatgaaggcagaccatggtgatgagcttccttttgttttcagaagtttctttgggggcaactacattaaattcactgaggaagaggagcagctaagcaggaagatgatgaagtactgggccaactttgcgagaaatgggaaccccaatggcgagggtctgccacactggccgctgttcgaccaggaggagcaatacctgcagctgaacctacagcctgcggtgggccgggctctgaaggcccacaggctccagttctggaagaaggcgctgccccaaaagatccaggagctcgaggagcctgaagagagacacacagagctgtagctccctgtgccggggaggagggggtgggttcgctgacaggcgagggtcagcctgctgtgcccacacacacccactaaggagaaagaagttgattccttcattcacttcgccattcattcatacttccgtccatccattcagaaagcatttattaagaatttactcaggcatgatggcccatacttgtaatcccagctattgggaaggatgagatgggaggatggcttgaggccagaggtttgagaccgaccagccagggcaacacagtgagaccccttctcaaaaaaaaaaaaaaaaaagagagagtgtgtgattagaagctaaataggaaagttttgagcttcaagtcagtgaggagtaaaaaagatttttaaaaagcaaagaaaacaaaatataagggaaaaatatgagaaaaataaaaataaaaagagaataataggccaggcactgtggctcatgcccctaatcccagcacttttgggaggtcaaggtgagcagaacacctgaggacaggagtttgagaccagcctgcccaacgtggtgaaaccccatctctatgaaaaatacaaaaatcagacgggcacagtggtggtgcccacctgtgatcccagctactcaggaggctgaggcaggagaattacttgaacctgggaggcagaggttgcagtgagctgagattgtgccactgtactccagcctgggcaacaagagcgagactccgtttccaaaaaaataagagagaatagaagaagctactgcatgatgttagttaccaagcctgccatgggtcctctcttgctagacacactccatagatccccccactgagctgtggatgggcaaaccccggtggaatcccaccctccccaacaccccactgagccctgggccccctcctcccttcctcacctccaccttctccctgccttctctcttctctcgtctgagcccccaggccttttccactttgagggaggtgcttcgaagaatgttgcccacacctaagtgttagaagcctatgtccgttcatccctgagaggtctgaaagaataaaaataaattctaaaaaaagcctc

SEQ ID NO: 8167 - protein, 107 aa, Homo sapiens [sequence omitted]

SEQ ID NO: 8168 - DNA, 2596 bp, Homo sapiens
cacagccctttagagatcggtggtgctgaagggcagggatcttattccaccttctgaagcttctgtcgaaccagttgtaaggagaatggagagagcagtgagagtggagtccggggtcctggtcggggtggtctgtctgctcctggcatgccctgccacagccactgggcccgaagttgctcagcctgaagtagacaccaccctgggtcgtgtgcgaggccggcaggtgggcgtgaagggcacagaccgccttgtgaatgtctttctgggcattccatttgcccagccgccactgggccctgaccggttctcagccccacacccagcacagccctgggagggtgtgcgggatgccagcactgcgcccccaatgtgcctacaagacgtggagagcatgaacagcagcagatttggccctgtccacctgatccagctccactatgcctacctgtcccctccccgtccctgtttccaaagcaccctagcggtcctgagactgcctgggctggcaggtgggcagctaaggtctcaggagcttgggggtcagtgccccatggccacctctgcaggtcatggtatgggtccatggaggcgctctgataactggcgctgccacctcctacgatggatcagctctggctgcctatggggatgtggtcgtggttacagtccagtaccgccttggggtccttggcttcttcagcactggagatgagcatgcacctggcaaccagggcttcctagatgtggtagctgctttgcgctgggtgcaagaaaacatcgcccccttcgggggtgacctcaactgtgtcactgtctttggtggatctgccggtgggagcatcatctctggcctggtcctgtccccagtggctgcagggctgttccacagagccatcacacagagtggggtcatcaccaccccagggatcatcgactctcacccttggcccctagctcagaaaatcgcaaacaccttggcctgcagctccagctccccggctgagatggtgcagtgccttcagcagaaagaaggagaagagctggtccttagcaagaagctggtatggccacccttttggggatggtgccgggcaatggcacagagggggttctatccatcccctgcaggagcagaggggcagtctacccccaggtggggctggggacagcagctcatgaggggaaggggctgagggcttggagacagaaatggagggccatctccatccccacagcaggcctgtcttctaggaaagaaactggacgcatctgttgccctgatctcctggttcccccgacccccttaaccctggtgatcttcatcccttcactttccctccaggctcagacactcaggcctgcagctcagtggctgctggggtcctagcctttgaggcttggccctaacttgggagcctcctgcattgctttctcctgcagaaaaatactatctatcctctcaccgttgatggcactgtcttccccaaaagccccaaggaactcctgaaggagaagcccttccactctgtgcccttcctcatgggtgtcaacaaccatgagttcagctggctcatccccaggggctggggtctcctggatacaatggagcagatgagccgggaggacatgctggccatctcaacacccgtcttgaccagtctggatgtgccccctgagatgatgcccaccgtcatagatgaatacctaggaagcaactcggacgcacaagccaaatgccaggcgttccaggaattcatgggtgacgtattcatcaatgttcccaccgtcagtttttcaagataccttcgagattctggaagccctgtctttttctatgagttccagcatcgacccagttcttttgcgaagatcaaacctgcctgggtgaaggctgatcatggggccgagggtgcttttgtgttcggaggtcccttcctcatggacgagagctcccgcctggcctttccagaggccacagaggaggagaagcagctaagcctcaccatgatggcccagtggacccactttgcccggacaggggaccccaatagcaaggctctgcctccttggccccaattcaaccaggcggaacaatatctggagatcaacccagtgccacgggccggacagaagttcagggaggcctggatgcagttctggtcagagacgctccccagcaagatacaacagtggcaccagaagcagaagaacaggaaggcccaggaggacctctgaggccaggcctgaaccttcttggctggggcaaaccactcttcaagtggtggcagagtcccagcacggcagcccgcctctccccctgctgagactttaatctccaccagcccttaaagtgtcggccgctctgtgactggagttatgctcttttgaaatgtcacaaggccgcctcccacctctggggcattgtacaagttcttccctctccctgaagtgcctttcctgctttcttcgtggtaggttctagcacattcctctagcttcctggaggactcactcccccaggaagccttccctgccttctctgggctgtgcggccccgagtctgcgtccattagagcacagtccacccgaggct

SEQ ID NO: 8169 - protein, 231 aa, Homo sapiens
MGVNNHEFSWLIPRGWGLLDTMEQMSREDMLAISTPVLTSLDVPPEMMPTVIDEYLGSNSDAQAKCQAFQEFMGDVFINVPTVSFSRYLRDSGSPVFFYEFQHRPSSFAKIKPAWVKADHGAEGAFVFGGPFLMDESSRLAFPEATEEEKQLSLTMMAQWTHFARTGDPNSKALPPWPQFNQAEQYLEINPVPRAGQKFREAWMQFWSETLPSKIQQWHQKQKNRKAQEDL

SEQ ID NO: 8170 - DNA, 4337 bp, Homo sapiens
cacagccctttagagatcggtggtgctgaagggcagggatcttattccaccttctgaagcttctgtcgaaccagttgtaaggagaatggagagagcagtgagagtggagtccggggtcctggtcggggtggtctgtctgctcctggcatgccctgccacagccactgggcccgaagttgctcagcctgaagtagacaccaccctgggtcgtgtgcgaggccggcaggtgggcgtgaagggcacagaccgccttgtgaatgtctttctgggcattccatttgcccagccgccactgggccctgaccggttctcagccccacacccagcacagccctgggagggtgtgcgggatgccagcactgcgcccccaatgtgcctacaagacgtggagagcatgaacagcagcagatttggccctgtccacctgatccagctccactatgcctacctgtcccctccccgtccctgtttccaaagcaccctagcggtcctgagactgcctgggctggcaggtgggcagctaaggtctcaggagcttgggggtcagtgccccatggccacctctgcaggtcatggtatgggtccatggaggcgctctgataactggcgctgccacctcctacgatggatcagctctggctgcctatggggatgtggtcgtggttacagtccagtaccgccttggggtccttggcttcttcagcactggagatgagcatgcacctggcaaccagggcttcctagatgtggtagctgctttgcgctgggtgcaagaaaacatcgcccccttcgggggtgacctcaactgtgtcactgtctttggtggatctgccggtgggagcatcatctctggcctggtcctgtccccagtggctgcagggctgttccacagagccatcacacagagtggggtcatcaccaccccagggatcatcgactctcacccttggcccctagctcagaaaatcgcaaacaccttggcctgcagctccagctccccggctgagatggtgcagtgccttcagcagaaagaaggagaagagctggtccttagcaagaagctggtatggccacccttttggggatggtgccgggcaatggcacagagggggttctatccatcccctgcaggagcagaggggcagtctacccccaggtggggctggggacagcagctcatgaggggaaggggctgagggcttggagacagaaatggagggccatctccatccccacagcaggcctgtcttctaggaaagaaactggacgcatctgttgccctgatctcctggttcccccgacccccttaaccctggtgatcttcatcccttcactttccctccaggctcagacactcaggcctgcagctcagtggctgctggggtcctagcctttgaggcttggccctaacttgggagcctcctgcattgctttctcctgcagaaaaatactatctatcctctcaccgttgatggcactgtcttccccaaaagccccaaggaactcctgaaggagaagcccttccactctgtgcccttcctcatgggtgtcaacaaccatgagttcagctggctcatccccaggggctggggtctcctggatacaatggagcagatgagccgggaggacatgctggccatctcaacacccgtcttgaccagtctggatgtgccccctgagatgatgcccaccgtcatagatgaatacctaggaagcaactcggacgcacaagccaaatgccaggcgttccaggaattcatgggtgacgtattcatcaatgttcccaccgtcagtttttcaagataccttcgagattctggaagccctgtctttttctatgagttccagcatcgacccagttcttttgcgaagatcaaacctgcctgggtgaaggctgatcatggggccgagggtgcttttgtgttcggaggtcccttcctcatggacgagagctcccgcctggcctttccagaggccacagaggaggagaagcagctaagcctcaccatgatggcccagtggacccactttgcccggacaggggaccccaatagcaaggctctgcctccttggccccaattcaaccaggcggaacaatatctggagatcaacccagtgccacgggccggacagaagttcagggaggcctggatgcagttctggtcagagacgctccccagcaagatacaacagtggcaccagaagcagaagaacaggaaggcccaggaggacctctgaggccaggcctgaaccttcttggctggggcaaaccactcttcaagtggtggcagagtcccagcacggcagcccgcctctccccctgctgagactttaatctccaccagcccttaaagtgtcggccgctctgtgactggagttatgctcttttgaaatgtcacaaggccgcctcccacctctggggcattgtacaagttcttccctctccctgaagtgcctttcctgctttcttcgtggtaggttctagcacattcctctagcttcctggaggactcactcccccaggaagccttccctgccttctctgggctgtgcggccccgagtctgcgtccattagagcacagtccacccgaggctagcaccgtgtctgtgtctgtctccccctcagaggagctctctcaaaatggggattagcctaaccccactctgtcacccacaccaggatcgggtgggacctggagctagggggtgtttgctgagtgagtgagtgaaacacagaatatgggaatggcagctgctgaacttgaacccagagccttcaggtgccaaagccatactcaggcccccaccgacattgtccaccctggccagaagggtgcatgccaatggcagagacctgggatgggagaagtcctggggcgccaggggatccagcctagagcagaccttagcccctgactaaggcctcagactagggcgggaggggtctcctcctctctgctgcccagtcctggcccctgcacaagacaacagaatccatcagggccatgagtgtcacccagacctgaccctcaccaattccagccctgaccctcaggacgctggatgccagctcccagccccagtgccgggtcctccctcccttcctggcttggggagaccagtttctggggagcttccaagagcacccaccaagacacagcaggacaggccaggggagggcatctggaccagggcatccgtcgggctattgtcacagagaaaagaagagacccacccactcgggctgcaaaaggtgaaaagcaccaagaggttttcagatggaagtgagaggtgacagtgtgctggcagccctcacagccctcgcttgctctccctgccgcctctgcctgggctcccactttggcagcacttgaggagcccttcaacccgccgctgcactgtaggagcccctttctgggctggccaaggccggagccagctccctcagcttgcggggaggtgcggagggagaggggcgggcaggaaccggggctgcgcgcagcgcttgcgggccagagtgagttccgggtgggcgtgggctcggcggggccccactcagagcagctggccggccccaggcagtgagggccttagcacctgggccagcagctgctgtgctcgatttctcgctgggccttagctgcctccccgcggggcagggctcgggacctgcagccctccatgcctgaccctccccccaccccccgtgggctcctgtgcggccggagcctccccaaggagcgccgccccctgctccacagcgcccagtcccatcgaccacccaagggctgaggagtgcgggtgcacagcgcgggactggcaggcagctccacctgctgccccagtgctggatccactgggtgaagccagctgggctcctgagtctggtggggacttggagaacctttatgtctagctaagggattgtaaatacaccgatgggcactctgtatctagctcaaggtttgtaaacacaccaatcagcaccctgtgtctagctcagtgtttgtgaatgcaccaatccacactctgtatctggctactctggtggggacttggagaacctttgtgtccacactctgtatctagctaatctagtggggatgtggagaacctttgtgtctagctcagggatcgtaaacgcaccaatcagcaccctgtcaaaacagaccacttgactctctgtaaaatggaccaatcagcaggatgtgggtggggcgagacaagagaataaaagcaggctgcctgagccagcagtgacaacccccctcgggtcccctcccacgccgtggaagctttgttctttcgctctttgcaataaatcttgctactgccc

SEQ ID NO: 8171 - protein, 231 aa, Homo sapiens; identical to SEQ ID NO: 8169

SEQ ID NO: 8172 - DNA, 3888 bp, Homo sapiens
gagatcggtggtgctgaagggcagggatcttattccaccttctgaagcttctgtcgaaccagttgtaaggagaatggagagagcagtgagagtggagtccggggtcctggtcggggtggtctgtctgctcctggcatgccctgccacagccactgggcccgaagttgctcagcctgaagtagacaccaccctgggtcgtgtgcgaggccggcaggtgggcgtgaagggcacagaccgccttgtgaatgtctttctgggcattccatttgcccagccgccactgggccctgaccggttctcagccccacacccagcacagccctgggagggtgtgcgggatgccagcactgcgcccccaatgtgcctacaagacgtggagagcatgaacagcagcagatttgtcctcaacggaaaacagcagatcttctccgtttcagaggactgcctggtcctcaacgtctatagcccagctgaggtccccgcagggtccggtaggccggtcatggtatgggtccatggaggcgctctgataactggcgctgccacctcctacgatggatcagctctggctgcctatggggatgtggtcgtggttacagtccagtaccgccttggggtccttggcttcttcagcactggagatgagcatgcacctggcaaccagggcttcctagatgtggtagctgctttgcgctgggtgcaagaaaacatcgcccccttcgggggtgacctcaactgtgtcactgtctttggtggatctgccggtgggagcatcatctctggcctggtcctgtccccagtggctgcagggctgttccacagagccatcacacagagtggggtcatcaccaccccagggatcatcgactctcacccttggcccctagctcagaaaatcgcaaacaccttggcctgcagctccagctccccggctgagatggtgcagtgccttcagcagaaagaaggagaagagctggtccttagcaagaagctgaaaaatactatctatcctctcaccgttgatggcactgtcttccccaaaagccccaaggaactcctgaaggagaagcccttccactctgtgcccttcctcatgggtgtcaacaaccatgagttcagctggctcatccccaggggctggggtctcctggatacaatggagcagatgagccgggaggacatgctggccatctcaacacccgtcttgaccagtctggatgtgccccctgagatgatgcccaccgtcatagatgaatacctaggaagcaactcggacgcacaagccaaatgccaggcgttccaggaattcatgggtgacgtattcatcaatgttcccaccgtcagtttttcaagataccttcgagattctggaagccctgtctttttctatgagttccagcatcgacccagttcttttgcgaagatcaaacctgcctgggtgaaggctgatcatggggccgagggtgcttttgtgttcggaggtcccttcctcatggacgagagctcccgcctggcctttccagaggccacagaggaggagaagcagctaagcctcaccatgatggcccagtggacccactttgcccggacaggggaccccaatagcaaggctctgcctccttggccccaattcaaccaggcggaacaatatctggagatcaacccagtgccacgggccggacagaagttcagggaggcctggatgcagttctggtcagagacgctccccagcaagatacaacagtggcaccagaagcagaagaacaggaaggcccaggaggacctctgaggccaggcctgaaccttcttggctggggcaaaccactcttcaagtggtggcagagtcccagcacggcagcccgcctctccccctgctgagactttaatctccaccagcccttaaagtgtcggccgctctgtgactggagttatgctcttttgaaatgtcacaaggccgcctcccacctctggggcattgtacaagttcttccctctccctgaagtgcctttcctgctttcttcgtggtaggttctagcacattcctctagcttcctggaggactcactcccccaggaagccttccctgccttctctgggctgtgcggccccgagtctgcgtccattagagcacagtccacccgaggctagcaccgtgtctgtgtctgtctccccctcagaggagctctctcaaaatggggattagcctaaccccactctgtcacccacaccaggatcgggtgggacctggagctagggggtgtttgctgagtgagtgagtgaaacacagaatatgggaatggcagctgctgaacttgaacccagagccttcaggtgccaaagccatactcaggcccccaccgacattgtccaccctggccagaagggtgcatgccaatggcagagacctgggatgggagaagtcctggggcgccaggggatccagcctagagcagaccttagcccctgactaaggcctcagactagggcgggaggggtctcctcctctctgctgcccagtcctggcccctgcacaagacaacagaatccatcagggccatgagtgtcacccagacctgaccctcaccaattccagccctgaccctcaggacgctggatgccagctcccagccccagtgccgggtcctccctcccttcctggcttggggagaccagtttctggggagcttccaagagcacccaccaagacacagcaggacaggccaggggagggcatctggaccagggcatccgtcgggctattgtcacagagaaaagaagagacccacccactcgggctgcaaaaggtgaaaagcaccaagaggttttcagatggaagtgagaggtgacagtgtgctggcagccctcacagccctcgcttgctctccctgccgcctctgcctgggctcccactttggcagcacttgaggagcccttcaacccgccgctgcactgtaggagcccctttctgggctggccaaggccggagccagctccctcagcttgcggggaggtgcggagggagaggggcgggcaggaaccggggctgcgcgcagcgcttgcgggccagagtgagttccgggtgggcgtgggctcggcggggccccactcagagcagctggccggccccaggcagtgagggccttagcacctgggccagcagctgctgtgctcgatttctcgctgggccttagctgcctccccgcggggcagggctcgggacctgcagccctccatgcctgaccctccccccaccccccgtgggctcctgtgcggccggagcctccccaaggagcgccgccccctgctccacagcgcccagtcccatcgaccacccaagggctgaggagtgcgggtgcacagcgcgggactggcaggcagctccacctgctgccccagtgctggatccactgggtgaagccagctgggctcctgagtctggtggggacttggagaacctttatgtctagctaagggattgtaaatacaccgatgggcactctgtatctagctcaaggtttgtaaacacaccaatcagcaccctgtgtctagctcagtgtttgtgaatgcaccaatccacactctgtatctggctactctggtggggacttggagaacctttgtgtccacactctgtatctagctaatctagtggggatgtggagaacctttgtgtctagctcagggatcgtaaacgcaccaatcagcaccctgtcaaaacagaccacttgactctctgtaaaatggaccaatcagcaggatgtgggtggggcgagacaagagaataaaagcaggctgcctgagccagcagtgacaacccccctcgggtcccctcccacgccgtggaagctttgttctttcgctctttgcaataaatcttgctactgccc

SEQ ID NO: 8173 - protein, 571 aa, Homo sapiens; identical to SEQ ID NO: 1136

SEQ ID NO: 8174 - DNA, 2145 bp, Homo sapiens
gatcggtggtgctgaagggcagggatcttattccaccttctgaagcttctgtcgaaccagttgtaaggagaatggagagagcagtgagagtggagtccggggtcctggtcggggtggtctgtctgctcctggcatgccctgccacagccactgggcccgaagttgctcagcctgaagtagacaccaccctgggtcgtgtgcgaggccggcaggtgggcgtgaagggcacagaccgccttgtgaatgtctttctgggcattccatttgcccagccgccactgggccctgaccggttctcagccccacacccagcacagccctgggagggtgtgcgggatgccagcactgcgcccccaatgtgcctacaagacgtggagagcatgaacagcagcagatttgtcctcaacggaaaacagcagatcttctccgtttcagaggactgcctggtcctcaacgtctatagcccagctgaggtccccgcagggtccggtaggccggtcatggtatgggtccatggaggcgctctgataactggcgctgccacctcctacgatggatcagctctggctgcctatggggatgtggtcgtggttacagtccagtaccgccttggggtccttggcttcttcagcactggagatgagcatgcacctggcaaccagggcttcctagatgtggtagctgctttgcgctgggtgcaagaaaacatcgcccccttcgggggtgacctcaactgtgtcactgtctttggtggatctgccggtgggagcatcatctctggcctggtcctgtccccagtggctgcagggctgttccacagagccatcacacagagtggggtcatcaccaccccagggatcatcgactctcacccttggcccctagctcagaaaatcgcaaacaccttggcctgcagctccagctccccggctgagatggtgcagtgccttcagcagaaagaaggagaagagctggtccttagcaagaagctgaaaaatactatctatcctctcaccgttgatggcactgtcttccccaaaagccccaaggaactcctgaaggagaagcccttccactctgtgcccttcctcatgggtgtcaacaaccatgagttcagctggctcatccccaggggctggggtctcctggatacaatggagcagatgagccgggaggacatgctggccatctcaacacccgtcttgaccagtctggatgtgccccctgagatgatgcccaccgtcatagatgaatacctaggaagcaactcggacgcacaagccaaatgccaggcgttccaggaattcatgggtgacgtattcatcaatgttcccaccgtcagtttttcaagataccttcgagattctggaagccctgtctttttctatgagttccagcatcgacccagttcttttgcgaagatcaaacctgcctgggtgaaggctgatcatggggccgagggtgcttttgtgttcggaggtcccttcctcatggacgagagctcccgcctggcctttccagaggccacagaggaggagaagcagctaagcctcaccatgatggcccagtggacccactttgcccggacaggggaccccaatagcaaggctctgcctccttggccccaattcaaccaggcggaacaatatctggagatcaacccagtgccacgggccggacagaagttcagggaggcctggatgcagttctggtcagagacgctccccagcaagatacaacagtggcaccagaagcagaagaacaggaaggcccaggaggacctctgaggccaggcctgaaccttcttggctggggcaaaccactcttcaagtggtggcagagtcccagcacggcagcccgcctctccccctgctgagactttaatctccaccagcccttaaagtgtcggccgctctgtgactggagttatgctcttttgaaatgtcacaaggccgcctcccacctctggggcattgtacaagttcttccctctccctgaagtgcctttcctgctttcttcgtggtaggttctagcacattcctctagcttcctggaggactcactcccccaggaagccttccctgccttctctgggctgtgcggccccgagtctgcgtccattagagcacagtccacccgaggct

SEQ ID NO: 8175 - protein, 571 aa, Homo sapiens; identical to SEQ ID NO: 1136

SEQ ID NO: 8176 - DNA, 3178 bp, Homo sapiens
gtgtgactctgtgccagagcaattgactaaaactctcaggttttagatatcaagccaccggggacttcatgagccaagtcccttccattcctttccaggtgcatagaacttcccacaagagtgtcagcactgtgctttcatcccgagcatcttgtttctgtcattcttattcttctacccatcttcacagcaatcattttcttcacttttctttttttttttttttcgtcttggcccattgcacaccctaagacaaagcaatccatttttgttgttgttgttgtttgtgtgtttgtttgttttttgagacagagcctcgatccatcatccaggctgcagtgcagcagcgccatcatgactctctactgcctcaacctctcaggcccgagcaatcctcccagcttcctgagtagctcgggcctcagggctggggtctcctggatacaatggagcagatgagccgggaggacatgctggccatctcaacacccgtcttgaccagtctggatgtgccccctgagatgatgcccaccgtcatagatgaatacctaggaagcaactcggacgcacaagccaaatgccaggcgttccaggaattcatgggtgacgtattcatcaatgttcccaccgtcagtttttcaagataccttcgagattctggaagccctgtctttttctatgagttccagcatcgacccagttcttttgcgaagatcaaacctgcctgggtgaaggctgatcatggggccgagggtgcttttgtgttcggaggtcccttcctcatggacgagagctcccgcctggcctttccagaggccacagaggaggagaagcagctaagcctcaccatgatggcccagtggacccactttgcccggacaggggaccccaatagcaaggctctgcctccttggccccaattcaaccaggcggaacaatatctggagatcaacccagtgccacgggccggacagaagttcagggaggcctggatgcagttctggtcagagacgctccccagcaagatacaacagtggcaccagaagcagaagaacaggaaggcccaggaggacctctgaggccaggcctgaaccttcttggctggggcaaaccactcttcaagtggtggcagagtcccagcacggcagcccgcctctccccctgctgagactttaatctccaccagcccttaaagtgtcggccgctctgtgactggagttatgctcttttgaaatgtcacaaggccgcctcccacctctggggcattgtacaagttcttccctctccctgaagtgcctttcctgctttcttcgtggtaggttctagcacattcctctagcttcctggaggactcactcccccaggaagccttccctgccttctctgggctgtgcggccccgagtctgcgtccattagagcacagtccacccgaggctagcaccgtgtctgtgtctgtctccccctcagaggagctctctcaaaatggggattagcctaaccccactctgtcacccacaccaggatcgggtgggacctggagctagggggtgtttgctgagtgagtgagtgaaacacagaatatgggaatggcagctgctgaacttgaacccagagccttcaggtgccaaagccatactcaggcccccaccgacattgtccaccctggccagaagggtgcatgccaatggcagagacctgggatgggagaagtcctggggcgccaggggatccagcctagagcagaccttagcccctgactaaggcctcagactagggcgggaggggtctcctcctctctgctgcccagtcctggcccctgcacaagacaacagaatccatcagggccatgagtgtcacccagacctgaccctcaccaattccagccctgaccctcaggacgctggatgccagctcccagccccagtgccgggtcctccctcccttcctggcttggggagaccagtttctggggagcttccaagagcacccaccaagacacagcaggacaggccaggggagggcatctggaccagggcatccgtcgggctattgtcacagagaaaagaagagacccacccactcgggctgcaaaaggtgaaaagcaccaagaggttttcagatggaagtgagaggtgacagtgtgctggcagccctcacagccctcgcttgctctccctgccgcctctgcctgggctcccactttggcagcacttgaggagcccttcaacccgccgctgcactgtaggagcccctttctgggctggccaaggccggagccagctccctcagcttgcggggaggtgcggagggagaggggcgggcaggaaccggggctgcgcgcagcgcttgcgggccagagtgagttccgggtgggcgtgggctcggcggggccccactcagagcagctggccggccccaggcagtgagggccttagcacctgggccagcagctgctgtgctcgatttctcgctgggccttagctgcctccccgcggggcagggctcgggacctgcagccctccatgcctgaccctccccccaccccccgtgggctcctgtgcggccggagcctccccaaggagcgccgccccctgctccacagcgcccagtcccatcgaccacccaagggctgaggagtgcgggtgcacagcgcgggactggcaggcagctccacctgctgccccagtgctggatccactgggtgaagccagctgggctcctgagtctggtggggacttggagaacctttatgtctagctaagggattgtaaatacaccgatgggcactctgtatctagctcaaggtttgtaaacacaccaatcagcaccctgtgtctagctcagtgtttgtgaatgcaccaatccacactctgtatctggctactctggtggggacttggagaacctttgtgtccacactctgtatctagctaatctagtggggatgtggagaacctttgtgtctagctcagggatcgtaaacgcaccaatcagcaccctgtcaaaacagaccacttgactctctgtaaaatggaccaatcagcaggatgtgggtggggcgagacaagagaataaaagcaggctgcctgagccagcagtgacaacccccctcgggtcccctcccacgccgtggaagctttgttctttcgctctttgcaataaatcttgctactgccc

SEQ ID NO: 8177 - protein, 210 aa, Homo sapiens
MEQMSREDMLAISTPVLTSLDVPPEMMPTVIDEYLGSNSDAQAKCQAFQEFMGDVFINVPTVSFSRYLRDSGSPVFFYEFQHRPSSFAKIKPAWVKADHGAEGAFVFGGPFLMDESSRLAFPEATEEEKQLSLTMMAQWTHFARTGDPNSKALPPWPQFNQAEQYLEINPVPRAGQKFREAWMQFWSETLPSKIQQWHQKQKNRKAQEDL

SEQ ID NO: 8178 - DNA, 338 bp, Homo sapiens
acggctaccatgccatccacagtgttgccatccacagtgttgccatcactcctgcccacagcaggagctggctggagcatgaggtggattctgtgctggagcctcaccctctgcctgatggcgcagacggccttgggtgccttgcacaccaagaggcctcaagtggtcaccaaatatggaaccctgcaaggaaaacagatgcatgtggggaagacacccatccaagtctttttaggagtccccttctccagacctcctctaggtatcctcaggtttgcacctccagaacccccggagccctggaaaggaatcagagatgctaccacctacccgcctgg

SEQ ID NO: 8179 - protein, 108 aa, Homo sapiens
MPSTVLPSTVLPSLLPTAGAGWSMRWILCWSLTLCLMAQTALGALHTKRPQVVTKYGTLQGKQMHVGKTPIQVFLGVPFSRPPLGILRFAPPEPPEPWKGIRDATTYP

SEQ ID NO: 8180 - DNA, 2080 bp, Homo sapiens
caggtgccttgcacaccaagaggcctcaagtggtcaccaaatatggaaccctgcaaggaaaacagatgcatgtggggaagacacccatccaagtctttttaggagtccccttctccagacctcctctaggtatcctcaggtttgcacctccagaacccccggagccctggaaaggaatcagagatgctaccacctacccgcctggatggagtctcgctctgtcgccaggctggagtgcagtggcacgatctcggctcactgcaacctccgcctcccgggttcaagcgagtctcctgcctcagcctctgagtatctggggctacaggtgcctgcaggagtcctggggccagctggcctcgatgtacgtcagcacgcgggaacggtacaagtggctgcgcttcagcgaggactgtctgtacctgaacgtgtacgcgccggcgcgcgcgcccggggatccccagctgccagtgatggtctggttcccgggaggcgccttcatcgtgggcgctgcttcttcgtacgagggctctgacttggccgcccgcgagaaagtggtgctggtgtttctgcagcacaggctcggcatcttcggcttcctgagcacggacgacagccacgcgcgcgggaactgggggctgctggaccagatggcggctctgcgctgggtgcaggagaacatcgcagccttcgggggagacccaggaaatgtgaccctgttcggccagtcggcgggggccatgagcatctcaggactgatgatgtcacccctagcctcgggtctcttccatcgggccatttcccagagtggcaccgcgttattcagacttttcatcactagtaacccactgaaagtggccaagaaggttgcccacctggctggatgcaaccacaacagcacacagatcctggtaaactgcctgagggcactatcagggaccaaggtgatgcgtgtgtccaacaagatgagattcctccaactgaacttccagagagacccggaagagattatctggtccatgagccctgtggtggatggtgtggtgatcccagatgaccctttggtgctcctgacccaggggaaggtttcatctgtgccctaccttctaggtgtcaacaacctggaattcaattggctcttgccttataatatcaccaaggagcaggtaccacttgtggtggaggagtacctggacaatgtcaatgagcatgactggaagatgctacgaaaccgtatgatggacatagttcaagatgccactttcgtgtatgccacactgcagactgctcactaccaccgagaaaccccaatgatgggaatctgccctgctggccacgctacaacaaggatgaaaagtacctgcagctggattttaccacaagagtgggcatgaagctcaaggagaagaagatggctttttggatgagtctgtaccagtctcaaagacctgagaagcagaggcaattctaagggtggctatgcaggaaggagccaaagaggggtttgcccccaccatccaggccctggggagactagccatggacatacctggggacaagagttctacccaccccagtttagaactgcaggagctccctgctgcctccaggccaaagctagagcttttgcctgttgtgtgggacctgcactgccctttccagcctgacatcccatgatgcccctctacttcactgttgacatccagttaggccaggccctgtcaacaccacactgtgctcagctctccagcctcaggacaacctctttttttcccttcttcaaatcctcccacccttcaatgtctccttgtgactccttcttatgggaggtcgacccagactgccactgcccctgtcactgcacccagcttggcatttaccatccatcctgctcaaccttgtgcctgtctgttcacattggcctggaggcctagggcaggttgtgacatggagcaaacttttggtagtttgggatcttctctcccacccacacttatctcccccagggccactccaaagtctatacacaggggtggtctcttcaataaagaagtgttgattagacctgaatttctccacctat

SEQ ID NO: 8181 - protein, 441 aa, Homo sapiens
MHVGKTPIQVFLGVPFSRPPLGILRFAPPEPPEPWKGIRDATTYPPGWSLALSPGWSAVARSRLTATSASRVQASLLPQPLSIWGYRCLQESWGQLASMYVSTRERYKWLRFSEDCLYLNVYAPARAPGDPQLPVMVWFPGGAFIVGAASSYEGSDLAAREKVVLVFLQHRLGIFGFLSTDDSHARGNWGLLDQMAALRWVQENIAAFGGDPGNVTLFGQSAGAMSISGLMMSPLASGLFHRAISQSGTALFRLFITSNPLKVAKKVAHLAGCNHNSTQILVNCLRALSGTKVMRVSNKMRFLQLNFQRDPEEIIWSMSPVVDGVVIPDDPLVLLTQGKVSSVPYLLGVNNLEFNWLLPYNITKEQVPLVVEEYLDNVNEHDWKMLRNRMMDIVQDATFVYATLQTAHYHRETPMMGICPAGHATTRMKSTCSWILPQEWA

SEQ ID NO: 8182 - DNA, 2591 bp, Homo sapiens
tatgaagaagaggagtgacatagtccgccagagtgtggccgaggagtaggaggagtgtgaagaggctggggtactgtccagaccagagacggtggtggccttgacatctccccagagatggggatggaggggagggaccatattccagagctgtttgggaggcagaagggagactgaggggagggtggggcatgaaagacagggaggtgcccagggcaggcaggttcctgccttgacagcaccaacaggagcaggaatctctccacggactgaggcgccgggcagggaggggatggttcctgagaggccaacctgcctcccagtcctgggccccggggctggcggaggcctcctgtacacgcacacgcacgcacatgcgcacgcacacgcacgcgcacagacgctgcctggattttgctttgggttccgtcttctcactgcggaccctggattgaaacgatctccccgcggccgccgccgctacctggtgcccgcaggtgcctgcaggagtcctggggccagctggcctcgatgtacgtcagcacgcgggaacggtacaagtggctgcgcttcagcgaggactgtctgtacctgaacgtgtacgcgccggcgcgcgcgcccggggatccccagctgccagtgatggtctggttcccgggaggcgccttcatcgtgggcgctgcttcttcgtacgagggctctgacttggccgcccgcgagaaagtggtgctggtgtttctgcagcacaggctcggcatcttcggcttcctgaggtggcggggccggtaccctttgggaccgcagctgtggccagagcggcggggactggcacggacgacagccacgcgcgcgggaactgggggctgctggaccagatggcggctctgcgctgggtgcaggagaacatcgcagccttcgggggagacccaggaaatgtgaccctgttcggccagtcggcgggggccatgagcatctcaggactgatgatgtcacccctagcctcgggtctcttccatcgggccatttcccagagtggcaccgcgttattcagacttttcatcactagtaacccactgaaagtggccaagaaggttgcccacctggctggatgcaaccacaacagcacacagatcctggtaaactgcctgagggcactatcagggaccaaggtgatgcgtgtgtccaacaagatgagattcctccaactgaacttccagagagacccggaagagattatctggtccatgagccctgtggtggatggtgtggtgatcccagatgaccctttggtgctcctgacccaggggaaggtttcatctgtgccctaccttctaggtgtcaacaacctggaattcaattggctcttgccttatatcatgaagttcccgctaaaccggcaggcgatgagaaaggaaaccatcactaagatgctctggagtacccgcaccctgttgaatatcaccaaggagcaggtaccacttgtggtggaggagtacctggacaatgtcaatgagcatgactggaagatgctacgaaaccgtatgatggacatagttcaagatgccactttcgtgtatgccacactgcagactgctcactaccaccgagatgccggcctccctgtctacctgtatgaatttgagcaccacgctcgtggaataatcgtcaaaccccgcactgatggggcagaccatggggatgagatgtacttcctctttgggggccccttcgccacaggcctttccatgggtaaggagaaggcacttagcctccagatgatgaaatactgggccaactttgcccgcacaggaaaccccaatgatgggaatctgccctgctggccacgctacaacaaggatgaaaagtacctgcagctggattttaccacaagagtgggcatgaagctcaaggagaagaagatggctttttggatgagtctgtaccagtctcaaagacctgagaagcagaggcaattctaagggtggctatgcaggaaggagccaaagaggggtttgcccccaccatccaggccctggggagactagccatggacatacctggggacaagagttctacccaccccagtttagaactgcaggagctccctgctgcctccaggccaaagctagagcttttgcctgttgtgtgggacctgcactgccctttccagcctgacatcccatgatgcccctctacttcactgttgacatccagttaggccaggccctgtcaacaccacactgtgctcagctctccagcctcaggacaacctctttttttcccttcttcaaatcctcccacccttcaatgtctccttgtgactccttcttatgggaggtcgacccagactgccactgcccctgtcactgcacccagcttggcatttaccatccatcctgctcaaccttgtgcctgtctgttcacattggcctggaggcctagggcaggttgtgacatggagcaaacttttggtagtttgggatcttctctcccacccacacttatctcccccagggccactccaaagtctatacacaggggtggtctcttcaataaagaagtgttgattagacctgaatttctccacctat

SEQ ID NO: 8183 - protein, 367 aa, Homo sapiens
MAALRWVQENIAAFGGDPGNVTLFGQSAGAMSISGLMMSPLASGLFHRAISQSGTALFRLFITSNPLKVAKKVAHLAGCNHNSTQILVNCLRALSGTKVMRVSNKMRFLQLNFQRDPEEIIWSMSPVVDGVVIPDDPLVLLTQGKVSSVPYLLGVNNLEFNWLLPYIMKFPLNRQAMRKETITKMLWSTRTLLNITKEQVPLVVEEYLDNVNEHDWKMLRNRMMDIVQDATFVYATLQTAHYHRDAGLPVYLYEFEHHARGIIVKPRTDGADHGDEMYFLFGGPFATGLSMGKEKALSLQMMKYWANFARTGNPNDGNLPCWPRYNKDEKYLQLDFTTRVGMKLKEKKMAFWMSLYQSQRPEKQRQF

SEQ ID NO: 8184 - DNA, 3898 bp, Homo sapiens
tatgaagaagaggagtgacatagtccgccagagtgtggccgaggagtaggaggagtgtgaagaggctggggtactgtccagaccagagacggtggtggccttgacatctccccagagatggggatggaggggagggaccatattccagagctgtttgggaggcagaagggagactgaggggagggtggggcatgaaagacagggaggtgcccagggcaggcaggttcctgccttgacagcaccaacaggagcaggaatctctccacggactgaggcgccgggcagggaggggatggttcctgagaggccaacctgcctcccagtcctgggccccggggctggcggaggcctcctgtacacgcacacgcacgcacatgcgcacgcacacgcacgcgcacagacgctgcctggattttgctttgggttccgtcttctcactgcggaccctggattgaaacgatctccccgcggccgccgccgctacctggtgcccgcaggtgcctgcaggagtcctggggccagctggcctcgatgtacgtcagcacgcgggaacggtacaagtggctgcgcttcagcgaggactgtctgtacctgaacgtgtacgcgccggcgcgcgcgcccggggatccccagctgccagtgatggtctggttcccgggaggcgccttcatcgtgggcgctgcttcttcgtacgagggctctgacttggccgcccgcgagaaagtggtgctggtgtttctgcagcacaggctcggcatcttcggcttcctgagcacggacgacagccacgcgcgcgggaactgggggctgctggaccagatggcggctctgcgctgggtgcaggagaacatcgcagccttcgggggagacccaggaaatgtgaccctgttcggccagtcggcgggggccatgagcatctcaggactgatgatgtcacccctagcctcgggtctcttccatcgggccatttcccagagtggcaccgcgttattcagacttttcatcactagtaacccactgaaagtggccaagaaggttgcccacctggctggatgcaaccacaacagcacacagatcctggtaaactgcctgagggcactatcagggaccaaggtgatgcgtgtgtccaacaagatgagattcctccaactgaacttccagagagacccggaagagattatctggtccatgagccctgtggtggatggtgtggtgatcccagatgaccctttggtgctcctgacccaggggaaggtttcatctgtgccctaccttctaggtgtcaacaacctggaattcaattggctcttgccttatatcatgaagttcccgctaaaccggcaggcgatgagaaaggaaaccatcactaagatgctctggagtacccgcaccctgttggtgagggacccagctggcaggggtgctcagttcggacagggttgacccccctgttttttttaacctagtagctgctctttgcaaaggggctcccagccagggtaaggatctttcttggagggtctggggtttgctgtgggatcagatgactgcttacaggtaaggtgctcagggtcacaggggcagttatgcagcaaaatcaggggttacaatcagcagagacagaaactttcccaggaagctccctttctccccctcccaggccaaaaactcctggggggctgagcatggatccaagtcactggtgggcccacctctggcccagctggcacccaggcctcaggtaagtgtggcctcctcactcagaatatcaccaaggagcaggtaccacttgtggtggaggagtacctggacaatgtcaatgagcatgactggaagatgctacgaaaccgtatgatggacatagttcaagatgccactttcgtgtatgccacactgcagactgctcactaccaccgaggtatgcagggtccccaagagtggccacactggccccgtccactctccaggtgtgctgtttaccaactgggcttatcgactgctcccctaccctctctgtacttctgggctagtataggattctaagatatcacagaggaggcagcatgctatcaactacaagagaggaaggggccaggcacggtggctcacacctgtaatcccagcactttgggaagccgaagtgggtggatcatttgaggccaggagttctagaccagcctcaccaacatggtgaaaacccatctctactaaaagtacaaaaaaattagccagctgtagtggcgcatgcctatagtcccagctactcagtaggctgacgcaggagaatcgcttgaacctgggagggggaggttgcagtgagccgacatcacaccactgcactccagcctgggcaacagagcgagactccatctcaaaaaaaaaacaaaaaaagtataagagaggaactgttcttccttaggaacaagggcaggacctcaaacagtccagaggagaagcctggggtggtcagggaaggcttcctggctgagaggacaggcttaggggcaccttgaaagttcaggctgactggggctaggggaacatgtgggtaacaggttaaaggggggggggctggaaaatgcagacaccaaagacccttcaatatgaggccaagaaaggaaggttcagaacagggaaaaggaaggcttccatgatcctggccacaatcctgtgaattaggttttagtattctcagtctgaagataaggaattattgatacaattcagaaaggtagagcaacttgctttaggtcacacagtgaatgagtagtgcagacaggattcaagtctgcccccttgattctgaagccaaagctctttttcctgcttggtgcaggtgagtgggaggcatggggtggatgagaagcctaggcagaggcttttcctgcatccctcctcagtttccctattcacagatgccggcctccctgtctacctgtatgaatttgagcaccacgctcgtggaataatcgtcaaaccccgcactgatggggcagaccatggggatgagatgtacttcctctttgggggccccttcgccacaggcctttccatgggtaaggagaaggcacttagcctccagatgatgaaatactgggccaactttgcccgcacaggaaaccccaatgatgggaatctgccctgctggccacgctacaacaaggatgaaaagtacctgcagctggattttaccacaagagtgggcatgaagctcaaggagaagaagatggctttttggatgagtctgtaccagtctcaaagacctgagaagcagaggcaattctaagggtggctatgcaggaaggagccaaagaggggtttgcccccaccatccaggccctggggagactagccatggacatacctggggacaagagttctacccaccccagtttagaactgcaggagctccctgctgcctccaggccaaagctagagcttttgcctgttgtgtgggacctgcactgccctttccagcctgacatcccatgatgcccctctacttcactgttgacatccagttaggccaggccctgtcaacaccacactgtgctcagctctccagcctcaggacaacctctttttttcccttcttcaaatcctcccacccttcaatgtctccttgtgactccttcttatgggaggtcgacccagactgccactgcccctgtcactgcacccagcttggcatttaccatccatcctgctcaaccttgtgcctgtctgttcacattggcctggaggcctagggcaggttgtgacatggagcaaacttttggtagtttgggatcttctctcccacccacacttatctcccccagggccactccaaagtctatacacaggggtggtctcttcaataaagaagtgttgattagacctgaatttctccacctat

SEQ ID NO: 8185 - protein, 303 aa, Homo sapiens [sequence omitted]

SEQ ID NO: 8186 - DNA, 2728 bp, Homo sapiens
tatgaagaagaggagtgacatagtccgccagagtgtggccgaggagtaggaggagtgtgaagaggctggggtactgtccagaccagagacggtggtggccttgacatctccccagagatggggatggaggggagggaccatattccagagctgtttgggaggcagaagggagactgaggggagggtggggcatgaaagacagggaggtgcccagggcaggcaggttcctgccttgacagcaccaacaggagcaggaatctctccacggactgaggcgccgggcagggaggggatggttcctgagaggccaacctgcctcccagtcctgggccccggggctggcggaggcctcctgtacacgcacacgcacgcacatgcgcacgcacacgcacgcgcacagacgctgcctggattttgctttgggttccgtcttctcactgcggaccctggattgaaacgatctccccgcggccgccgccgctacctggtgcccgcaggtgcctgcaggagtcctggggccagctggcctcgatgtacgtcagcacgcgggaacggtacaagtggctgcgcttcagcgaggactgtctgtacctgaacgtgtacgcgccggcgcgcgcgcccggggatccccagctgccagtgatggtctggttcccgggaggcgccttcatcgtgggcgctgcttcttcgtacgagggctctgacttggccgcccgcgagaaagtggtgctggtgtttctgcagcacaggctcggcatcttcggcttcctgaggtggcggggccggtaccctttgggaccgcagctgtggccagagcggcggggactggcacggacgacagccacgcgcgcgggaactgggggctgctggaccagatggcggctctgcgctgggtgcaggagaacatcgcagccttcgggggagacccaggaaatgtgaccctgttcggccagtcggcgggggccatgagcatctcaggactgatgatgtcacccctagcctcgggtctcttccatcgggccatttcccagagtggcaccgcgttattcagacttttcatcactagtaacccactgaaagtggccaagaaggttgcccacctggctggatgcaaccacaacagcacacagatcctggtaaactgcctgagggcactatcagggaccaaggtgatgcgtgtgtccaacaagatgagattcctccaactgaacttccagagagacccggaagagattatctggtccatgagccctgtggtggatggtgtggtgatcccagatgaccctttggtgctcctgacccaggggaaggtttcatctgtgccctaccttctaggtgtcaacaacctggaattcaattggctcttgccttatatcatgaagttcccgctaaaccggcaggcgatgagaaaggaaaccatcactaagatgctctggagtacccgcaccctgttgaatatcaccaaggagcaggtaccacttgtggtggaggagtacctggacaatgtcaatgagcatgactggaagatgctacgaaaccgtatgatggacatagttcaagatgccactttcgtgtatgccacactgcagactgctcactaccaccgagatgccggcctccctgtctacctgtatgaatttgagcaccacgctcgtggaataatcgtcaaaccccgcactgatggggcagaccatggggatgagatgtacttcctctttgggggccccttcgccacaggcctttccatgggtaaggagaaggcacttagcctccagatgatgaaatactgggccaactttgcccgcacaggaaaccccaatgatgggaatctgccctgctggccacgctacaacaaggatgaaaagtacctgcagctggattttaccacaagagtgggcatgaagctcaaggagaagaagatggctttttggatgagtctgtaccagtctcaaagacctgagaagcagaggcaattctaagggtggctatgcaggaaggagccaaagaggggtttgcccccaccatccaggccctggggagactagccatggacatacctggggacaagagttctacccaccccagtttagaactgcaggagctccctgctgcctccaggccaaagctagagcttttgcctgttgtgtgggacctgcactgccctttccagcctgacatcccatgatgcccctctacttcactgttgacatccagttaggccaggccctgtcaacaccacactgtgctcagctctccagcctcaggacaacctctttttttcccttcttcaaatcctcccacccttcaatgtctccttgtgactccttcttatgggaggtcgacccagactgccactgcccctgtcactgcacccagcttggcatttaccatccatcctgctcaaccttgtgcctgtctgttcacattggcctggaggcctagggcaggttgtgacatggagcaaacttttggtagtttgggatcttctctcccacccacacttatctcccccagggccactccaaagtctatacacaggggtggtctcttcaataaagaagtgttgattagacctgaatttctccacctataaaatgggtgtgtgaagtgaatgatgtctcaatttgagccctgagagaaaggaagtattgctgcctgttccttagtgggctgtgcctggatgctacactcagtcaaagggtgctactgcaaagttgcctggggtaca

SEQ ID NO: 8187 - protein, 367 aa, Homo sapiens; identical to SEQ ID NO: 8183

SEQ ID NO: 8188 - DNA, 827 bp, Homo sapiens
gatgagaaaggaaaccatcactaagatgctctggagtacccgcaccctgttggtgagggacccagctggcaggggtgctcagttcggacagggttgacccccctgttttttttaacctagtagctgctctttgcaaaggggctcccagccagggtaaggatctttcttggagggtctggggtttgctgtgggatcagatgactgcttacaggtaaggtgctcagggtcacaggggcagttatgcagcaaaatcaggggttacaatcagcagagacagaaactttcccaggaagctccctttctccccctcccaggccaaaaactcctggggggctgagcatggatccaagtcactggtgggcccacctctggcccagctggcacccaggcctcaggtaagtgtggcctcctcactcagaatatcaccaaggagcaggtaccacttgtggtggaggagtacctggacaatgtcaatgagcatgactggaagatgctacgaaaccgtatgatggacatagttcaagatgccactttcgtgtatgccacactgcagactgctcactaccaccgagatgccggcctccctgtctacctgtatgaatttgagcaccacgctcgtggaataatcgtcaaaccccgcactgatggggcagaccatggggatgagatgtacttcctctttgggggccccttcgccacaggtgcaaaggtcccacctgataccccaactgggtgtccagtctcccacctctggatgcagacccacccctccattggctggccacagggagctcaccagttcctaatctgttatgctctcccaaatg

SEQ ID NO: 8189 - protein, 111 aa, Homo sapiens
MLRNRMMDIVQDATFVYATLQTAHYHRDAGLPVYLYEFEHHARGIIVKPRTDGADHGDEMYFLFGGPFATGAKVPPDTPTGCPVSHLWMQTHPSIGWPQGAHQFLICYALP

SEQ ID NO: 8190 - DNA, 1351 bp, Homo sapiens
tgagaaaggaaaccatcactaagatgctctggagtacccgcaccctgttggtgagggacccagctggcaggggtgctcagttcggacagggttgacccccctgttttttttaacctagtagctgctctttgcaaaggggctcccagccagggtaaggatctttcttggagggtctggggtttgctgtgggatcagatgactgcttacaggtaaggtgctcagggtcacaggggcagttatgcagcaaaatcaggggttacaatcagcagagacagaaactttcccaggaagctccctttctccccctcccaggccaaaaactcctggggggctgagcatggatccaagtcactggtgggcccacctctggcccagctggcacccaggcctcaggtaagtgtggcctcctcactcagaatatcaccaaggagcaggtaccacttgtggtggaggagtacctggacaatgtcaatgagcatgactggaagatgctacgaaaccgtatgatggacatagttcaagatgccactttcgtgtatgccacactgcagactgctcactaccaccgagaaaccccaatgatgggaatctgccctgctggccacgctacaacaaggatgaaaagtacctgcagctggattttaccacaagagtgggcatgaagctcaaggagaagaagatggctttttggatgagtctgtaccagtctcaaagacctgagaagcagaggcaattctaagggtggctatgcaggaaggagccaaagaggggtttgcccccaccatccaggccctggggagactagccatggacatacctggggacaagagttctacccaccccagtttagaactgcaggagctccctgctgcctccaggccaaagctagagcttttgcctgttgtgtgggacctgcactgccctttccagcctgacatcccatgatgcccctctacttcactgttgacatccagttaggccaggccctgtcaacaccacactgtgctcagctctccagcctcaggacaacctctttttttcccttcttcaaatcctcccacccttcaatgtctccttgtgactccttcttatgggaggtcgacccagactgccactgcccctgtcactgcacccagcttggcatttaccatccatcctgctcaaccttgtgcctgtctgttcacattggcctggaggcctagggcaggttgtgacatggagcaaacttttggtagtttgggatcttctctcccacccacacttatctcccccagggccactccaaagtctatacacaggggtggtctcttcaataaagaagtgttgattagacctgaatttctccacctat

SEQ ID NO: 8191 - protein, 57 aa, Homo sapiens
MLRNRMMDIVQDATFVYATLQTAHYHRETPMMGICPAGHATTRMKSTCSWILPQEWA

SEQ ID NO: 8192 - DNA, 1488 bp, Homo sapiens
tgagaaaggaaaccatcactaagatgctctggagtacccgcaccctgttggtgagggacccagctggcaggggtgctcagttcggacagggttgacccccctgttttttttaacctagtagctgctctttgcaaaggggctcccagccagggtaaggatctttcttggagggtctggggtttgctgtgggatcagatgactgcttacaggtaaggtgctcagggtcacaggggcagttatgcagcaaaatcaggggttacaatcagcagagacagaaactttcccaggaagctccctttctccccctcccaggccaaaaactcctggggggctgagcatggatccaagtcactggtgggcccacctctggcccagctggcacccaggcctcaggtaagtgtggcctcctcactcagaatatcaccaaggagcaggtaccacttgtggtggaggagtacctggacaatgtcaatgagcatgactggaagatgctacgaaaccgtatgatggacatagttcaagatgccactttcgtgtatgccacactgcagactgctcactaccaccgagaaaccccaatgatgggaatctgccctgctggccacgctacaacaaggatgaaaagtacctgcagctggattttaccacaagagtgggcatgaagctcaaggagaagaagatggctttttggatgagtctgtaccagtctcaaagacctgagaagcagaggcaattctaagggtggctatgcaggaaggagccaaagaggggtttgcccccaccatccaggccctggggagactagccatggacatacctggggacaagagttctacccaccccagtttagaactgcaggagctccctgctgcctccaggccaaagctagagcttttgcctgttgtgtgggacctgcactgccctttccagcctgacatcccatgatgcccctctacttcactgttgacatccagttaggccaggccctgtcaacaccacactgtgctcagctctccagcctcaggacaacctctttttttcccttcttcaaatcctcccacccttcaatgtctccttgtgactccttcttatgggaggtcgacccagactgccactgcccctgtcactgcacccagcttggcatttaccatccatcctgctcaaccttgtgcctgtctgttcacattggcctggaggcctagggcaggttgtgacatggagcaaacttttggtagtttgggatcttctctcccacccacacttatctcccccagggccactccaaagtctatacacaggggtggtctcttcaataaagaagtgttgattagacctgaatttctccacctataaaatgggtgtgtgaagtgaatgatgtctcaatttgagccctgagagaaaggaagtattgctgcctgttccttagtgggctgtgcctggatgctacactcagtcaaagggtgctactgcaaagttgcctggggtaca

SEQ ID NO: 8193 - protein, 57 aa, Homo sapiens; identical to SEQ ID NO: 8191

SEQ ID NO: 8194 - DNA, 314 bp, Homo sapiens
gtatgatggacatagttcaagatgccactttcgtgtatgccacactgcagactgctcactaccaccgagatgccggcctccctgtctacctgtatgaatttgagcaccacgctcgtggaataatcgtcaaaccccgcactgatggggcagaccatggggatgagatgtacttcctctttgggggccccttcgccacaggtgcaaaggtcccacctgataccccaactgggtgtccagtctcccacctctggatgcagacccaccctccaaagtctatacacaggggtggtctcttcaataaagaagtgttgatt

SEQ ID NO: 8195 - protein, 103 aa, Homo sapiens
MMDIVQDATFVYATLQTAHYHRDAGLPVYLYEFEHHARGIIVKPRTDGADHGDEMYFLFGGPFATGAKVPPDTPTGCPVSHLWMQTHPPKSIHRGGLFNKEVL

SEQ ID NO: 8196 - DNA, 616 bp, Homo sapiens
ttcgtgtatgccacactgcagactgctcactaccaccgagatgccggcctccctgtctacctgtatgaatttgagcaccacgctcgtggaataatcgtcaaaccccgcactgatggggcagaccatggggatgagatgtacttcctctttgggggccccttcgccacaggtgcaaaggtcccacctgataccccaactgggtgtccagtctcccacctctggatgcagacccacccctccattggctggccacagggagctcaccagttcctaatctgttatgctctcccaaatgaaagtcttctgctccggaagcagcagaagcagcaggagtagggtgggagaaaccccaatgatgggaatctgccctgctggccacgctacaacaaggatgaaaagtacctgcagctggattttaccacaagagtgggcatgaagctcaaggagaagaagatggctttttggatgagtctgtaccagtctcaaagacctgagaagcagaggcaattctaagggtggctatgcaggaaggagccaaagaggggtttgcccccggccactccaaagtctatacacaggggtggtctcttcaataaagaagtgttgattagacctg

SEQ ID NO: 8197 - protein, 51 aa, Homo sapiens
MLSQMKVFCSGSSRSSRSRVGETPMMGICPAGHATTRMKSTCSWILPQEWA

SEQ ID NO: 8198 - DNA, 1559 bp, Homo sapiens
gggggggctggaaaatgcagacaccaaagacccttcaatatgaggccaagaaaggaaggttcagaacagggaaaaggaaggcttccatgatcctggccacaatcctgtgaattaggttttagtattctcagtctgaagataaggaattattgatacaattcagaaaggtagagcaacttgctttaggtcacacagtgaatgagtagtgcagacaggattcaagtctgcccccttgattctgaagccaaagctctttttcctgcttggtgcaggtgagtgggaggcatggggtggatgagaagcctaggcagaggcttttcctgcatccctcctcagtttccctattcacagatgccggcctccctgtctacctgtatgaatttgagcaccacgctcgtggaataatcgtcaaaccccgcactgatggggcagaccatggggatgagatgtacttcctctttgggggccccttcgccacaggtgcaaaggtcccacctgataccccaactgggtgtccagtctcccacctctggatgcagacccacccctccattggctggccacagggagctcaccagttcctaatctgttatgctctcccaaatgaaagtcttctgctccggaagcagcagaagcagcaggagtagggtgggaggtcagtgtcccctgctctgtccgaaatcccacatcccattctgcccccaggcctttccatgggtaaggagaaggcacttagcctccagatgatgaaatactgggccaactttgcccgcacaggaaaccccaatgatgggaatctgccctgctggccacgctacaacaaggatgaaaagtacctgcagctggattttaccacaagagtgggcatgaagctcaaggagaagaagatggctttttggatgagtctgtaccagtctcaaagacctgagaagcagaggcaattctaagggtggctatgcaggaaggagccaaagaggggtttgcccccaccatccaggccctggggagactagccatggacatacctggggacaagagttctacccaccccagtttagaactgcaggagctccctgctgcctccaggccaaagctagagcttttgcctgttgtgtgggacctgcactgccctttccagcctgacatcccatgatgcccctctacttcactgttgacatccagttaggccaggccctgtcaacaccacactgtgctcagctctccagcctcaggacaacctctttttttcccttcttcaaatcctcccacccttcaatgtctccttgtgactccttcttatgggaggtcgacccagactgccactgcccctgtcactgcacccagcttggcatttaccatccatcctgctcaaccttgtgcctgtctgttcacattggcctggaggcctagggcaggttgtgacatggagcaaacttttggtagtttgggatcttctctcccacccacacttatctcccccagggccactccaaagtctatacacaggggtggtctcttcaataaagaagtgttgattagacctgaatttctccacctat

SEQ ID NO: 8199 - protein, 77 aa, Homo sapiens [sequence omitted]

SEQ ID NO: 8200 - DNA, 1696 bp, Homo sapiens
gggggggctggaaaatgcagacaccaaagacccttcaatatgaggccaagaaaggaaggttcagaacagggaaaaggaaggcttccatgatcctggccacaatcctgtgaattaggttttagtattctcagtctgaagataaggaattattgatacaattcagaaaggtagagcaacttgctttaggtcacacagtgaatgagtagtgcagacaggattcaagtctgcccccttgattctgaagccaaagctctttttcctgcttggtgcaggtgagtgggaggcatggggtggatgagaagcctaggcagaggcttttcctgcatccctcctcagtttccctattcacagatgccggcctccctgtctacctgtatgaatttgagcaccacgctcgtggaataatcgtcaaaccccgcactgatggggcagaccatggggatgagatgtacttcctctttgggggccccttcgccacaggtgcaaaggtcccacctgataccccaactgggtgtccagtctcccacctctggatgcagacccacccctccattggctggccacagggagctcaccagttcctaatctgttatgctctcccaaatgaaagtcttctgctccggaagcagcagaagcagcaggagtagggtgggaggtcagtgtcccctgctctgtccgaaatcccacatcccattctgcccccaggcctttccatgggtaaggagaaggcacttagcctccagatgatgaaatactgggccaactttgcccgcacaggaaaccccaatgatgggaatctgccctgctggccacgctacaacaaggatgaaaagtacctgcagctggattttaccacaagagtgggcatgaagctcaaggagaagaagatggctttttggatgagtctgtaccagtctcaaagacctgagaagcagaggcaattctaagggtggctatgcaggaaggagccaaagaggggtttgcccccaccatccaggccctggggagactagccatggacatacctggggacaagagttctacccaccccagtttagaactgcaggagctccctgctgcctccaggccaaagctagagcttttgcctgttgtgtgggacctgcactgccctttccagcctgacatcccatgatgcccctctacttcactgttgacatccagttaggccaggccctgtcaacaccacactgtgctcagctctccagcctcaggacaacctctttttttcccttcttcaaatcctcccacccttcaatgtctccttgtgactccttcttatgggaggtcgacccagactgccactgcccctgtcactgcacccagcttggcatttaccatccatcctgctcaaccttgtgcctgtctgttcacattggcctggaggcctagggcaggttgtgacatggagcaaacttttggtagtttgggatcttctctcccacccacacttatctcccccagggccactccaaagtctatacacaggggtggtctcttcaataaagaagtgttgattagacctgaatttctccacctataaaatgggtgtgtgaagtgaatgatgtctcaatttgagccctgagagaaaggaagtattgctgcctgttccttagtgggctgtgcctggatgctacactcagtcaaagggtgctactgcaaagttgcctggggtaca

SEQ ID NO: 8201 - protein, 77 aa, Homo sapiens [sequence omitted]

SEQ ID NO: 8202 - DNA, 1141 bp, Homo sapiens
agtattctcagtctgaagataaggaattattgatacaattcagaaaggtagagcaacttgctttaggtcacacagtgaatgagtagtgcagacaggattcaagtctgcccccttgattctgaagccaaagctctttttcctgcttggtgcaggtgagtgggaggcatggggtggatgagaagcctaggcagaggcttttcctgcatccctcctcagtttccctattcacagatgccggcctccctgtctacctgtatgaatttgagcaccacgctcgtggaataatcgtcaaaccccgcactgatggggcagaccatggggatgagatgtacttcctctttgggggccccttcgccacagaaaccccaatgatgggaatctgccctgctggccacgctacaacaaggatgaaaagtacctgcagctggattttaccacaagagtgggcatgaagctcaaggagaagaagatggctttttggatgagtctgtaccagtctcaaagacctgagaagcagaggcaattctaagggtggctatgcaggaaggagccaaagaggggtttgcccccaccatccaggccctggggagactagccatggacatacctggggacaagagttctacccaccccagtttagaactgcaggagctccctgctgcctccaggccaaagctagagcttttgcctgttgtgtgggacctgcactgccctttccagcctgacatcccatgatgcccctctacttcactgttgacatccagttaggccaggccctgtcaacaccacactgtgctcagctctccagcctcaggacaacctctttttttcccttcttcaaatcctcccacccttcaatgtctccttgtgactccttcttatgggaggtcgacccagactgccactgcccctgtcactgcacccagcttggcatttaccatccatcctgctcaaccttgtgcctgtctgttcacattggcctggaggcctagggcaggttgtgacatggagcaaacttttggtagtttgggatcttctctcccacccacacttatctcccccagggccactccaaagtctatacacaggggtggtctcttcaataaagaagtgttgattagacctgaatttctccacctat

SEQ ID NO: 8203 - protein, 41 aa, Homo sapiens
MYFLFGGPFATETPMMGICPAGHATTRMKSTCSWILPQEWA

SEQ ID NO: 8204 - DNA, 1278 bp, Homo sapiens
agtattctcagtctgaagataaggaattattgatacaattcagaaaggtagagcaacttgctttaggtcacacagtgaatgagtagtgcagacaggattcaagtctgcccccttgattctgaagccaaagctctttttcctgcttggtgcaggtgagtgggaggcatggggtggatgagaagcctaggcagaggcttttcctgcatccctcctcagtttccctattcacagatgccggcctccctgtctacctgtatgaatttgagcaccacgctcgtggaataatcgtcaaaccccgcactgatggggcagaccatggggatgagatgtacttcctctttgggggccccttcgccacagaaaccccaatgatgggaatctgccctgctggccacgctacaacaaggatgaaaagtacctgcagctggattttaccacaagagtgggcatgaagctcaaggagaagaagatggctttttggatgagtctgtaccagtctcaaagacctgagaagcagaggcaattctaagggtggctatgcaggaaggagccaaagaggggtttgcccccaccatccaggccctggggagactagccatggacatacctggggacaagagttctacccaccccagtttagaactgcaggagctccctgctgcctccaggccaaagctagagcttttgcctgttgtgtgggacctgcactgccctttccagcctgacatcccatgatgcccctctacttcactgttgacatccagttaggccaggccctgtcaacaccacactgtgctcagctctccagcctcaggacaacctctttttttcccttcttcaaatcctcccacccttcaatgtctccttgtgactccttcttatgggaggtcgacccagactgccactgcccctgtcactgcacccagcttggcatttaccatccatcctgctcaaccttgtgcctgtctgttcacattggcctggaggcctagggcaggttgtgacatggagcaaacttttggtagtttgggatcttctctcccacccacacttatctcccccagggccactccaaagtctatacacaggggtggtctcttcaataaagaagtgttgattagacctgaatttctccacctataaaatgggtgtgtgaagtgaatgatgtctcaatttgagccctgagagaaaggaagtattgctgcctgttccttagtgggctgtgcctggatgctacactcagtcaaagggtgctactgcaaagttgcctggggtaca

SEQ ID NO: 8205 - protein, 41 aa, Homo sapiens; identical to SEQ ID NO: 8203

SEQ ID NO: 8206 - DNA, 1102 bp, Homo sapiens
tgaagctcaaggagaagaagatggctttttggatgagtctgtaccagtctcaaagacctgagaagcagaggcaattctaagggtggctatgcaggaaggagccaaagaggggtttgcccccaccatccaggccctggggagactagccatggacatacctggggacaagagttctacccaccccagtttagaactgcaggagctccctgctgcctccaggccaaagctagagcttttgcctgttgtgtgggacctgcactgccctttccagcctgacatcccatgatgcccctctacttcactgttgacatccagttaggccaggccctgtcaacaccacactgtgctcagctctccagcctcaggacaacctctttttttcccttcttcaaatcctcccacccttcaatgtctccttgtgactccttcttatgggaggtcgacccagactgccactgcccctgtcactgcacccagcttggcatttaccatccatcctgctcaaccttgtgcctgtctgttcacattggcctggaggcctagggcaggttgtgacatggagcaaacttttggtagtttgggatcttctctcccacccacacttatctcccccagggccactccaaagtctatacacaggggtggtctcttcaataaagaagtgttgattagacctgaatttctccacctataaaatgggtgtgtgaagtgaatgatgtctcaatttgagccctgagagaaaggaagtattgctgcctgttccttagtgggctgtgcctggatgctacactcagtcaaagggtgctactgcaaagttgcctggggtacaaaacacttgccttttgccttcatggtctcaagtgcacccctcaggacagccacaccccacgctcacttgtccatcagtttaggtcttagtgccacatctagattcctctggcctctcctgcagcccgtgtgtatcccagcctcctgggtgacagagtgagaccctctctaccgccttggcctccataagtgctggaattacaggcacaagctaactgctcggcccctatgcctatttcgatgctcctgaataaagtctgctttactgagcttt

SEQ ID NO: 8207 - protein, 68 aa, Homo sapiens [sequence omitted]

SEQ ID NO: 8208 - DNA, 1067 bp, Homo sapiens
gggggcggtgagcgctggggctgcgcgggcggcaggcaacggctgaggcggcggcggcggcggcggcggcgtgggttgggctcgagcgggcggcggcgcctcagactccccggaacgggagcccacgcgggcgggcgcctgaaacaaagggaagcgggcgtccgggcgccgcgggtgggcggtcagtcggtcagcgcggagccagccagcgggtgcccgcgcaagccccgagcgcggccggccggcgcggcctcagggcgggaagatgccgcgcgtcgtgcccgaccagagaagcaagttcgagaacgaggagttttttaggaagctgagccgcgagtgtgagattaagtacacgggcttcagggaccggccccacgaggaacgccaggcacgcttccagaacgcctgccgcgacggccgctcggaaatcgcttttgtggccacaggaaccaatctgtctctccagttttttccggccagctggcagggagaacagcgacaaacacctagccgagagtatgtcgacttagaaagagaagcaggcaaggtatatttgaaggctcccatgattctgaatggagtctgtgttatctggaaaggctggattgatctccaaagactggatggtatgggctgtctggagtttgatgaggagcgagcccaggtagggtaacatcaggctttattgagcatggtccctttagtccctaatcttgcctttgcctggggacctattttacccaatttttaagagtaagtatagaaagtattgtgttgaagcaatattgaggaatcctgaaaatgttgatactcaaattctgatcctgattttgggaaagttttttcttcagcagttctaaatttcatgggttattcgtatctgctcagtgggtgcttcaaagtccagcaagtagctctttaaaatatttattcttgatctttagaacactatgaatagggaaaaaagaaaaaactgttcaaaataaaatgtaggagccgtgcttttggaatgcttgagtgaggagctcaacaagtcctctcccaagaaagcaatgataaaacttgac

SEQ ID NO: 8209 - protein, 135 aa, Homo sapiens
MPRVVPDQRSKFENEEFFRKLSRECEIKYTGFRDRPHEERQARFQNACRDGRSEIAFVATGTNLSLQFFPASWQGEQRQTPSREYVDLEREAGKVYLKAPMILNGVCVIWKGWIDLQRLDGMGCLEFDEERAQVG

SEQ ID NO: 8210 - DNA, 2477 bp, Homo sapiens
gggggcggtgagcgctggggctgcgcgggcggcaggcaacggctgaggcggcggcggcggcggcggcggcgtgggttgggctcgagcgggcggcggcgcctcagactccccggaacgggagcccacgcgggcgggcgcctgaaacaaagggaagcgggcgtccgggcgccgcgggtgggcggtcagtcggtcagcgcggagccagccagcgggtgcccgcgcaagccccgagcgcggccggccggcgcggcctcagggcgggaagatgccgcgcgtcgtgcccgaccagagaagcaagttcgagaacgaggagttttttaggaagctgagccgcgagtgtgagattaagtacacgggcttcagggaccggccccacgaggaacgccaggcacgcttccagaacgcctgccgcgacggccgctcggaaatcgcttttgtggccacaggaaccaatctgtctctccagttttttccggccagctggcagggagaacagcgacaaacacctagccgagagtatgtcgacttagaaagagaagcaggcaaggtatatttgaaggctcccatgattctgaatggagtctgtgttatctggaaaggctggattgatctccaaagactggatggtatgggctgtctggagtttgatgaggagcgagcccagcaggaggatgcattagcacaacaggcctttgaagaggctcggagaaggacacgcgaatttgaagatagagacaggtctcatcgggaggaaatggaggtgagagtttcacagctgctggcagtaactggcaagaagacaacaagaccctagtcctggttccaatttaggtggtggtgatgacctcaaacttcgttaattaatagcacagcagatgtgtgctgcccatctttacatacacattgcttctagttggcagaaataattgattaaaagaccagaaactgtgataactggaggtactacggtctatttctcaaccttaggcagtaatagacatcacaaactgccatggttttgcactatgattataatacctgcatttctaattttttaagcatgtagccagtaataatttgaagttttttttctatgcaagcttaccttgttggcattattttagggagttgaaactatcaactgtaaagctccttttcttccactttaatttaaaagttcatgtcatttaaaaacaagtcaagaaattaaaattgtatcagagggttttctctaatcattttttctatttttttttttgtacttctagatgttttggttatacagcttcattttagatgagcattcttattttttgttttgtttgccccatttccttttgtgtttttatagtctatagcattttaaaactgctgatgttgtttgcattatttacaggctaaaaacttagtagcatagagctgtctgccacagccttctgacaaagtttacagttattaaagttgcagtatccttttaaatgctagtaatcagcactctttcttttttttttttttaatagagacagggtctcgcagtgttgcccaggctggtctcgaactcctggcatcaagcgatcctcctgccttagcctcccagagtactgggattacaggctctttctttttaaacataaaagttttaaattggtattaactctgtactctgccctagattgttttagcttctgttctgtaatcatgagtttggttggagatattctccatagatgatcttctactgaaatgcctaaagaagtcacaggctggcttctgttttattcagggatttttttaaaaagtcaatcagaaaagggatactggagcttcttcatgtatgtaacagcatattaaactggagacagtgatgaatcagctacaaaggtaatattgtattaaaatcatgtttaagatagctgcttttatgtgtattttatattgcatgcttttgtaaaaacatgctgggtgatgaaagattagttttagagagaaaatgttcatctgtgcagaggatgcattttcttccattaattctggaaaaaacgttcacagttatatatatggtattttgcaaaaggactattaatagaaccttttgagatgaattaatgtaagaatattttttaaataggcttactgtcaaattgcaactttttttttagatacagagtggaaaacagtgctaagtcatttggcacctccttacaaatatttttcatggtcacatttattaaatgttactacatttctgaatttttgaaaaatgtattttatcattaaatggcattattttaaagggtgaaaaactgacacagtcaattcagaaaatggactgaagtctgaataaggtcattgcatttaaaaagcatataactgtacttgactgatgagggaggtgttactttcattgtatataggtcttatttcataaacagatatcctgtatcaaataaaagtatttgttatatatttgaagttat

SEQ ID NO: 8211 - protein, 182 aa, Homo sapiens; identical to SEQ ID NO: 1140

SEQ ID NO: 8212 - DNA, 3140 bp, Homo sapiens
gggggcggtgagcgctggggctgcgcgggcggcaggcaacggctgaggcggcggcggcggcggcggcggcgtgggttgggctcgagcgggcggcggcgcctcagactccccggaacgggagcccacgcgggcgggcgcctgaaacaaagggaagcgggcgtccgggcgccgcgggtgggcggtcagtcggtcagcgcggagccagccagcgggtgcccgcgcaagccccgagcgcggccggccggcgcggcctcagggcgggaagatgccgcgcgtcgtgcccgaccagagaagcaagttcgagaacgaggagttttttaggaagctgagccgcgagtgtgagattaagtacacgggcttcagggaccggccccacgaggaacgccaggcacgcttccagaacgcctgccgcgacggccgctcggaaatcgcttttgtggccacaggaaccaatctgtctctccagttttttccggccagctggcagggagaacagcgacaaacacctagccgagagtatgtcgacttagaaagagaagcaggcaaggtatatttgaaggctcccatgattctgaatggagtctgtgttatctggaaaggctggattgatctccaaagactggatggtatgggctgtctggagtttgatgaggagcgagcccagcaggaggatgcattagcacaacaggcctttgaagaggctcggagaaggacacgcgaatttgaagatagagacaggtctcatcgggaggaaatggaggtgagagtttcacagctgctggcagtaactggcaagaagacaacaagaccctagtcctggttccaatttaggtggtggtgatgacctcaaacttcgttaattaatagcacagcagatgtgtgctgcccatctttacatacacattgcttctagttggcagaaataattgattaaaagaccagaaactgtgataactggaggtactacggtctatttctcaaccttaggcagtaatagacatcacaaactgccatggttttgcactatgattataatacctgcatttctaattttttaagcatgtagccagtaataatttgaagttttttttctatgcaagcttaccttgttggcattattttagggagttgaaactatcaactgtaaagctccttttcttccactttaatttaaaagttcatgtcatttaaaaacaagtcaagaaattaaaattgtatcagagggttttctctaatcattttttctatttttttttttgtacttctagatgttttggttatacagcttcattttagatgagcattcttattttttgttttgtttgccccatttccttttgtgtttttatagtctatagcattttaaaactgctgatgttgtttgcattatttacaggctaaaaacttagtagcatagagctgtctgccacagccttctgacaaagtttacagttattaaagttgcagtatccttttaaatgctagtaatcagcactctttcttttttttttttttaatagagacagggtctcgcagtgttgcccaggctggtctcgaactcctggcatcaagcgatcctcctgccttagcctcccagagtactgggattacaggctctttctttttaaacataaaagttttaaattggtattaactctgtactctgccctagattgttttagcttctgttctgtaatcatgagtttggttggagatattctccatagatgatcttctactgaaatgcctaaagaagtcacaggctggcttctgttttattcagggatttttttaaaaagtcaatcagaaaagggatactggagcttcttcatgtatgtaacagcatattaaactggagacagtgatgaatcagctacaaaggtaatattgtattaaaatcatgtttaagatagctgcttttatgtgtattttatattgcatgcttttgtaaaaacatgctgggtgatgaaagattagttttagagagaaaatgttcatctgtgcagaggatgcattttcttccattaattctggaaaaaacgttcacagttatatatatggtattttgcaaaaggactattaatagaaccttttgagatgaattaatgtaagaatattttttaaataggcttactgtcaaattgcaactttttttttagatacagagtggaaaacagtgctaagtcatttggcacctccttacaaatatttttcatggtcacatttattaaatgttactacatttctgaatttttgaaaaatgtattttatcattaaatggcattattttaaagggtgaaaaactgacacagtcaattcagaaaatggactgaagtctgaataaggtcattgcatttaaaaagcatataactgtacttgactgatgagggaggtgttactttcattgtatataggtcttatttcataaacagatatcctgtatcaaataaaagtatttgttatatatttgaagttatgcatggaaaggagtgtgtttaaattgttacaaacaataatgcgtcattaaaggccatgctgatcttgcataactataagtactatgaatgaatttggttggttttggtgttgtacagctcacatgtttacacactcagtgccctaatttcccctgagggaatcgctttttaagtgatccttacagtggtgttttatgttactttattacagagctccttggttttttacttctgcacttaaatttttttaaataacatgatgatggtacattttcctctattgtctagctaagggctttcggtccaccagtaaataagatcaaatgctcttaaatgttcctgttaccatcctaatgtaaatactggatttttctgtcatttagcaccatgctgcttctgtctgtcttaatgctggcattaagatcatgagccctttttctccagtagtacaggctttgaaaactacttctattaagttattgatgcaatttgatattttttcataatctatatttaaacaaaattacatcattgcatcatcttttctaaattcatctccattaaaacttgccttaagctaccagattgcttttgccaccattggccatactgtgtgtttgtttgtttaatttactttcacaataaacttctgtgtagtaaaaa

SEQ ID NO: 8213 - protein, 182 aa, Homo sapiens; identical to SEQ ID NO: 1140

SEQ ID NO: 8214 - DNA, 849 bp, Homo sapiens
cttaagcagccaatggcaaatgtcctcaaaatggaatcagatgtttgtaacttaatacttaagaaaaatgatgagtgcatgtttttttttacttttaagtattctctgtgctgcctggcttaagacataaactgatgtaaaaataaatgactgcttgcataatttatgtaatgtcctgctcctgatcctgtttgtattgatttttctaaaaggcttttgtggccacaggaaccaatctgtctctccagttttttccggccagctggcagggagaacagcgacaaacacctagccgagagtatgtcgacttagaaagagaagcaggcaaggtatatttgaaggctcccatgattctgaatggagtctgtgttatctggaaaggctggattgatctccaaagactggatggtatgggctgtctggagtttgatgaggagcgagcccaggtagggtaacatcaggctttattgagcatggtccctttagtccctaatcttgcctttgcctggggacctattttacccaatttttaagagtaagtatagaaagtattgtgttgaagcaatattgaggaatcctgaaaatgttgatactcaaattctgatcctgattttgggaaagttttttcttcagcagttctaaatttcatgggttattcgtatctgctcagtgggtgcttcaaagtccagcaagtagctctttaaaatatttattcttgatctttagaacactatgaatagggaaaaaagaaaaaactgttcaaaataaaatgtaggagccgtgcttttggaatgcttgagtgaggagctcaacaagtcctctcccaagaaagcaatgataaaacttgac

SEQ ID NO: 8215 - protein, 36 aa, Homo sapiens
MANVLKMESDVCNLILKKNDECMFFFTFKYSLCCLA

SEQ ID NO: 8216 - DNA, 2023 bp, Homo sapiens
cactgccggcctgcgcggtactcactgccggcctccgcggtacccactgccggcctccgcgctacccggccgcagcgcgcgagtcacatggaagctcctgaggagcccgcgccagtgcgcggaggcccggaggccacccttgaggtccgtgggtcgcgctgcttgcggctgtccgccttccgagaagagctgcgggcgctcttggtcctggctggccccgcgttcttggttcagctgatggtgttcctgatcagcttcataagctccgtgttctgtggccacctgggcaagctggagctggatgcagtcacgctggcaatcgcggttatcaatgtcactggtgtctcagtgggattcggcttatcttctgcctgtgacaccctcatctcccagacgtacgggagccagaacctgaagcacgtgggcgtgatcctgcagcggagtgcgctcgtcctgctcctctgctgcttcccctgctgggcgctctttctcaacacccagcacatcctgctgctcttcaggcaggacccagatgtgtccaggcttacccagacctatgtcacgatcttcattccagctcttcctgcaacctttctttatatgttacaagttaaatatttgctcaaccagggaattgtactgccccagatcgtaactggagttgcagccaaccttgtcaatgccctcgccaactatctgtttctccatcaactgcatcttggggtgataggctctgcactggcaaacttgatttcccagtacaccctggctctactcctctttctctacatcctcgggaaaaaactgcatcaagctacatggggaggctggtccctcgagtgcctgcaggactgggcctccttcctccgcctggccatccccagcatgctcatgctgtgcatggagtggtgggcctatgaggtcgggagcttcctcagtggcatcctcggcatggtggagctgggcgctcagtccatcgtgtatgaactggccatcattgtgtacatggtccctgcaggcttcagtgtggctgccagtgtccgggtaggaaacgctctgggtgctggagacatggagcaggcacggaagtcctctaccgtttccctgctgattacagtgctctttgctgtagccttcagtgtcctgctgttaagctgtaaggatcacgtggggtacatttttactaccgaccgagacatcattaatctggtggctcaggtggttccaatttatgctgtttcccacctctttgaagctcttgcttgcacgagtggtggtgttctgagggggagtggaaatcagaaggttggagccattgtgaataccattgggtactatgtggttggcctccccatcgggatcgcgctgatgtttgcaaccacacttggagtgatgggtctgtggtcagggatcatcatctgtacagtctttcaagctgtgtgttttctaggctttattattcagctaaattggaaaaaagcctgtcagcaggctcaggtacacgccaatttgaaagtaaacaacgtgcctcggagtgggaattctgctctccctcaggatccgcttcacccagggtgccctgaaaaccttgaaggaattttaacgaacgatgttggaaagacaggcgagcctcagtcagatcagcagatgcgccaagaagaacctttgccggaacatccacaggacggcgctaaattgtccaggaaacagctggtgctgcggcgagggcttctgctcctgggggtcttcttaatcttgctggctggagtgcggtggtgcgatcatagctcactgcagcctcgaactcttgggcttcaagcaatcctcctgtgtcagccaccagagtagctgagactacagggctggtgaaactgcgtgctgtaagctgggaccagctttgtccataactgctgagagaacttgctgaagctctaggaataattttgcctgcccggttgctcaccagttgtagcttgccagctcccaacacccttcctggtgccaataaactttctcaaagagc

SEQ ID NO: 8217 - protein, 586 aa, Homo sapiens
MEAPEEPAPVRGGPEATLEVRGSRCLRLSAFREELRALLVLAGPAFLVQLMVFLISFISSVFCGHLGKLELDAVTLAIAVINVTGVSVGFGLSSACDTLISQTYGSQNLKHVGVILQRSALVLLLCCFPCWALFLNTQHILLLFRQDPDVSRLTQTYVTIFIPALPATFLYMLQVKYLLNQGIVLPQIVTGVAANLVNALANYLFLHQLHLGVIGSALANLISQYTLALLLFLYILGKKLHQATWGGWSLECLQDWASFLRLAIPSMLMLCMEWWAYEVGSFLSGILGMVELGAQSIVYELAIIVYMVPAGFSVAASVRVGNALGAGDMEQARKSSTVSLLITVLFAVAFSVLLLSCKDHVGYIFTTDRDIINLVAQVVPIYAVSHLFEALACTSGGVLRGSGNQKVGAIVNTIGYYVVGLPIGIALMFATTLGVMGLWSGIIICTVFQAVCFLGFIIQLNWKKACQQAQVHANLKVNNVPRSGNSALPQDPLHPGCPENLEGILTNDVGKTGEPQSDQQMRQEEPLPEHPQDGAKLSRKQLVLRRGLLLLGVFLILLAGVRWCDHSSLQPRTLGLQAILLCQPPE

SEQ ID NO: 8218 - DNA, 1923 bp, Homo sapiens
cactgccggcctgcgcggtactcactgccggcctccgcggtacccactgccggcctccgcgctacccggccgcagcgcgcgagtcacatggaagctcctgaggagcccgcgccagtgcgcggaggcccggaggccacccttgaggtccgtgggtcgcgctgcttgcggctgtccgccttccgagaagagctgcgggcgctcttggtcctggctggccccgcgttcttggttcagctgatggtgttcctgatcagcttcataagctccgtgttctgtggccacctgggcaagctggagctggatgcagtcacgctggcaatcgcggttatcaatgtcactggtgtctcagtgggattcggcttatcttctgcctgtgacaccctcatctcccagacgtacgggagccagaacctgaagcacgtgggcgtgatcctgcagcggagtgcgctcgtcctgctcctctgctgcttcccctgctgggcgctctttctcaacacccagcacatcctgctgctcttcaggcaggacccagatgtgtccaggcttacccagacctatgtcacgatcttcattccagctcttcctgcaacctttctttatatgttacaagttaaatatttgctcaaccagggaattgtactgccccagatcgtaactggagttgcagccaaccttgtcaatgccctcgccaactatctgtttctccatcaactgcatcttggggtgataggctctgcactggcaaacttgatttcccagtacaccctggctctactcctctttctctacatcctcgggaaaaaactgcatcaagctacatggggaggctggtccctcgagtgcctgcaggactgggcctccttcctccgcctggccatccccagcatgctcatgctgtgcatggagtggtgggcctatgaggtcgggagcttcctcagtggtctgtatgaggatggatgacggggactggtgggaacctgggggccctgtctgggtgcaaggcgacagctgtctttcttcaccaggcatcctcggcatggtggagctgggcgctcagtccatcgtgtatgaactggccatcattgtgtacatgagacatcattaatctggtggctcaggtggttccaatttatgctgtttcccacctctttgaagctcttgcttgcacgagtggtggtgttctgagggggagtggaaatcagaaggttggagccattgtgaataccattgggtactatgtggttggcctccccatcgggatcgcgctgatgtttgcaaccacacttggagtgatgggtctgtggtcagggatcatcatctgtacagtctttcaagctgtgtgttttctaggctttattattcagctaaattggaaaaaagcctgtcagcaggctcaggtacacgccaatttgaaagtaaacaacgtgcctcggagtgggaattctgctctccctcaggatccgcttcacccagggtgccctgaaaaccttgaaggaattttaacgaacgatgttggaaagacaggcgagcctcagtcagatcagcagatgcgccaagaagaacctttgccggaacatccacaggacggcgctaaattgtccaggaaacagctggtgctgcggcgagggcttctgctcctgggggtcttcttaatcttgctggctggagtgcggtggtgcgatcatagctcactgcagcctcgaactcttgggcttcaagcaatcctcctgtgtcagccaccagagtagctgagactacagggctggtgaaactgcgtgctgtaagctgggaccagctttgtccataactgctgagagaacttgctgaagctctaggaataattttgcctgcccggttgctcaccagttgtagcttgccagctcccaacacccttcctggtgccaataaactttctcaaagagc

SEQ ID NO: 8219 - protein, 290 aa, Homo sapiens
MEAPEEPAPVRGGPEATLEVRGSRCLRLSAFREELRALLVLAGPAFLVQLMVFLISFISSVFCGHLGKLELDAVTLAIAVINVTGVSVGFGLSSACDTLISQTYGSQNLKHVGVILQRSALVLLLCCFPCWALFLNTQHILLLFRQDPDVSRLTQTYVTIFIPALPATFLYMLQVKYLLNQGIVLPQIVTGVAANLVNALANYLFLHQLHLGVIGSALANLISQYTLALLLFLYILGKKLHQATWGGWSLECLQDWASFLRLAIPSMLMLCMEWWAYEVGSFLSGLYEDG

SEQ ID NO: 8220 - DNA, 3281 bp, Homo sapiens
cactgccggcctgcgcggtactcactgccggcctccgcggtacccactgccggcctccgcgctacccggccgcagcgcgcgagtcacatggaagctcctgaggagcccgcgccagtgcgcggaggcccggaggccacccttgaggtccgtgggtcgcgctgcttgcggctgtccgccttccgagaagagctgcgggcgctcttggtcctggctggccccgcgttcttggttcagctgatggtgttcctgatcagcttcataagctccgtgttctgtggccacctgggcaagctggagctggatgcagtcacgctggcaatcgcggttatcaatgtcactggtgtctcagtgggattcggcttatcttctgcctgtgacaccctcatctcccagacgtacgggagccagaacctgaagcacgtgggcgtgatcctgcagcggagtgcgctcgtcctgctcctctgctgcttcccctgctgggcgctctttctcaacacccagcacatcctgctgctcttcaggcaggacccagatgtgtccaggcttacccagacctatgtcacgatcttcattccagctcttcctgcaacctttctttatatgttacaagttaaatatttgctcaaccagggaattgtactgccccagatcgtaactggagttgcagccaaccttgtcaatgccctcgccaactatctgtttctccatcaactgcatcttggggtgataggctctgcactggcaaacttgatttcccagtacaccctggctctactcctctttctctacatcctcgggaaaaaactgcatcaagctacatggggaggctggtccctcgagtgcctgcaggactgggcctccttcctccgcctggccatccccagcatgctcatgctgtgcatggagtggtgggcctatgaggtcgggagcttcctcagtggcatcctcggcatggtggagctgggcgctcagtccatcgtgtatgaactggccatcattgtgtacatggtccctgcaggcttcagtgtggctgccagtgtccgggtaggaaacgctctgggtgctggagacatggagcaggcacggaagtcctctaccgtttccctgctgattacagtgctctttgctgtagccttcagtgtcctgctgttaagctgtaaggatcacgtggggtacatttttactaccgaccgagacatcattaatctggtggctcaggtggttccaatttatgctgtttcccacctctttgaagctcttgcttgcacgagtggtggtgttctgagggggagtggaaatcagaaggttggagccattgtgaataccattgggtactatgtggttggcctccccatcgggatcgcgctgatgtttgcaaccacacttggagtgatgggtctgtggtcagggatcatcatctgtacagtctttcaagctgtgtgttttctaggctttattattcagctaaattggaaaaaagcctgtcagcaggctcaggtacacgccaatttgaaagtaaacaacgtgcctcggagtgggaattctgctctccctcaggatccgcttcacccagggtgccctgaaaaccttgaaggaattttaacgaacgatgttggaaagacaggcgagcctcagtcagatcagcagatgcgccaagaagaacctttgccggaacatccacaggacggcgctaaattgtccaggaaacagctggtgctgcggcgagggcttctgctcctgggggtcttcttaatcttgctggtggggattttagtgagattctatgtcagaattcagtgacgtggtaggaaagaaagtcaggtcaagtgatgcttttgagcttacacacaattcacaggcccaccagtgacaatttactgtgagttaatgtcattcaggtgtgcccatggattttgagggctggaaatgcaaagacacatttttctataaaaagaaaaagcaactaaggttaaaagctatattgtggcccaagacactgtctgaaagatgacatgagtagtaattcaccactatctgaaccaagcaaggatcaatgtgctgactgcattggccaatggctttgatacttctgctatttttttagacacaaacccataaactaactgcttaagaattcatactgcttgaattatgtaaaatatattttacagtatatctttccttgggccttagattactattcactgggcaaatggtatttgtttttgttttaattttttttttaatagacggaagtcttgctctgtcatgcaggctggagtgcggtggtgcgatcatagctcactgcagcctcgaactcttgggcttcaagcaatcctcctgtgtcagccaccagagtagctgagactacaggggtatgccaccatgcccagctggcatttgttaatcttcatttgaggtctagatctaggcactgtggacactgaaaaacagttgggaaatctttcgagctgtggaaatccaaacaaagactgataattcctggtaggggtgtgtgcgtgacgtactgcagcctcaacctcctgggctcaagtgatcctcccacctcagcctcctgagtagctgagaccacaggcgtgtgccaccacgcctagctaattttttataccagggtctaccctttgtttcccaggctggtcttgaattcctgggatcaagcaatccttccaccttgccctcccaaagtgttgggattataggcatgagccaccacgactggccagaggacaaaattttaataaaggtcttagcttaagcagtaatcctacttcattaagccttcctggggtgcggtacacaccgttaattcagcaaccctcagtacatactaagtatgctcagtgctgtgaaagtggattacaccaaattaagtcattcttatcacacccaatcaaaagtcaagaagccagggataaaagcacctcaggcacataacattaatctagtaatgtaattctctgcacatccagctggtgaaactgcgtgctgtaagctgggaccagctttgtccataactgctgagagaacttgctgaagctctaggaataattttgcctgcccggttgctcaccagttgtagcttgccagctcccaacacccttcctggtgccaataaactttctcaaagagcaatactgacatttcttttgataaaacctccagccttctctgtgttgttccgacataccgaggaccaactggtctacatggatgccctgaacatgcaattctttcttccaaaataaaacattaaatagaga

SEQ ID NO: 8221 - protein, 570 aa, Homo sapiens; identical to SEQ ID NO: 1144

SEQ ID NO: 8222 - DNA, 731 bp, Homo sapiens
gagttcctgccagaccttggaccttaacttgcttctgacacagactttgctagaagcttccagagcagggctgagcacctacagatgactggagaacaccaaaggcaggccaggtgggaatggatggcgggaaaagccctgtgaatctcaaggcaccacacagggcacagagggagaccccaggtaacatgcacatggtcaaaaaatggaacaatatgaacaagatagtaagcaaagtcttactgcaatgcccttccagtttgccccagtaccagccctgcctcctccagatttcacatttcaagaaaatcctagcactcaccggtcggtagtaaaaatgtaccccacgtgatccttacagcttaacagcaggacactgaaggctacagcaaagagcactgaaggtaaaaacggcagaagaaacaacacagtgaacaagaagatccacaggaagtggaggagcctgggttttgcatgcagagactgcaccaagagcctcgggtaaaggggtctcagcacctgtaatcagcagggaaacggtagaggacttccgtgcctgctccatgtctccagcacccagagcgtttcctacccggacactggcagccacactgaagcctgcagggacctaaaataaaaaggaaacctgcaacaatgagtgagaaactgcagagcgagaacacgtgcagagaagcagcctcatgcctcacacctggtgggaaaacttggtc

SEQ ID NO: 8223 - protein, 70 aa, Homo sapiens
MDGGKSPVNLKAPHRAQRETPGNMHMVKKWNNMNKIVSKVLLQCPSSLPQYQPCLLQISHFKKILALTGR

SEQ ID NO: 8224 - DNA, 500 bp, Homo sapiens
ctctctcacttgtgctgcctggttcctcccttcccatggtgcacatcatgtaggccactgacgccagctcacagatgatgccctgagtgccgagctccatcacatcaatcagtcctgcaaggaagtttccgatctcaaaggtccactgctcagtgcacaccatgaacatactgggaataaccaggtggatgtaggagccccactcctggaagcactccctcgtccaaccgtgacggcgagcgtgacagcgtccggctcgaccttgcccagatgtccacagaagatggagctgacgaggctgattataaagatcatcaactgcgcaagaaacactgggcccgcgagcgccgccagctcagccgcctccccccgcaggtccgggggcagcgcaccccgcaggccccacaagccgtcacgccatccgagggcccggagccgctatgggggccggtccttggcggcggcggggagctcggcggggaccggggcgtcggcggccg

SEQ ID NO: 8225 - protein, 75 aa, Homo sapiens
MSTEDGADEADYKDHQLRKKHWARERRQLSRLPPQVRGQRTPQAPQAVTPSEGPEPLWGPVLGGGGELGGDRGVG

SEQ ID NO: 8226 - DNA, 503 bp, Homo sapiens
atgtggaaagttgtttcttcctgcatttcatccaggctttcagagaaagtggaaaacacttctgctggtgatggtaggcggctttccctagtctcagaaaatgtcccctgtgtccccgtgagatgggtacacaccctaagaacacggagggccaccggagcttctcattcagctacatgggagccaagaccttgccaggtggaatcagtcacacattttatttacaggatagcccaaatttatgtgctgattttcattcctgcccttcctgatttggggagtgctgcattcgggcaccctcggagccgttcgaaatgtcaagacggtggcttctgcctcagccagttggaatcggcctgtgtcaattcttcagggagtacatcttttatccactctggaaaattccaaatagtgccctagcattgtctcatgtgagtgaggttctctgagatcatacatcaaggggaagtgtcttatttaagattaaaaaccggaactaaact

SEQ ID NO: 8227 - protein, 139 aa, Homo sapiens
MWKVVSSCISSRLSEKVENTSAGDGRRLSLVSENVPCVPVRWVHTLRTRRATGASHSATWEPRPCQVESVTHFIYRIAQIYVLIFIPALPDLGSAAFGHPRSRSKCQDGGFCLSQLESACVNSSGSTSFIHSGKFQIVP

SEQ ID NO: 8228 - DNA, 1141 bp, Homo sapiens
aaaaagtctaactagaaaatggaatgagtcctgtaatatgtactcaaataactccttttgttctgtatccaaccagtgcattacttttactaggtaaaaactctgattctgtcaccatttctttgtgaagtattagtcttacagctgtcacaagaactttgtgtcaacacaaacacagcggctgtttcttatcgtctttttggaaatgtcatctggtggattaatgagtctctggtctggattgatagtttgtgtcttctttcaagcccttttctatctggtgtacatcttgaggataaactggagcaaagttgtggagcaggcacaggttcaagctggactaaaagggaataaagagaccatgcctacctcctcagatctacctatcttgggaagagaagtaactgatggaatcattttgcctgatatcatcagaccagagagccagacccctcgactgatgagaccagaagaaaacacccagtatgcaatgtccaccgctggagaggtcctgacagtgaggcagctgatattctatcatggaatggctttagctcttgctgtcactttcctttcagcaggaattttcattaagagttttcaatgaccatggctaaaatggtagaattaccaccattctacaaactagaaatgataattatatgccatatgttaagtatgaaaggtgaccttgttatttggacagtttttactcttaactgtggatggaaagaatatcagggatgtttccttggttattccaaggaattgcactatcctattggagatcaagaaaggggctataattttaagtaaagttttccctgttaattttatcatggtttctaaatatacaaattagattttccttgatgtaaaggttacttactctttcttatttcaaacatctttcttctcctggggagtggttcatagtcctgtaaaatattattgctgatctattttctttgtatttctctatgaatgtacttaatcttgtcagtgagtgtatattaagtgcttgttcaagtcctatctcaggtattgccatataagcttttataaaatggaacctcttaaaatttacaatgtatgctgacaatatttggagctatacagtcaatacaaaagattaactttt

SEQ ID NO: 8229 - protein, 133 aa, Homo sapiens
MSSGGLMSLWSGLIVCVFFQALFYLVYILRINWSKVVEQAQVQAGLKGNKETMPTSSDLPILGREVTDGIILPDIIRPESQTPRLMRPEENTQYAMSTAGEVLTVRQLIFYHGMALALAVTFLSAGIFIKSFQ

SEQ ID NO: 8230 - DNA, 3927 bp, Homo sapiens
gggcgctctcagcaggatggccaacaccttccctccatccctacaccccgccgccccctggcccgtggccgcgctcggctcccgcactgctcactccaccccctacatcccagcccgctgccagagccggggagagggcgggggccgcgtgggcgaggccgtgaacagcggctgtcacgtgggccgcccaggccaataggggtgaggctttgggtcgagctcagtcctcccccggcgcctccgactggcagtgggactcagcgggcgtggaggtcgcggctgagcgagcgagccctgggcgagtgaattgtggctgtgggttgacggtggagacaccccccggagggaggcggagggaagggaggcgaggcctgcacctgcatgcttcccgcctcccactccccagcgcccccggaccgtgcagttctctgcaggaccaggccatggagctcgaagtccggcgggtccgacaggcgttcctgtccggccggtcgcgacctctgcggtttcggctgcagcagctggaggccctgcggaggatggtgcaggagcgcgagaaggatatcctgacggccatcgccgccgacctgtgcaagagtgaattcaatgtgtacagtcaggaagtcattactgtccttggggaaattgattttatgcttgagaatcttcctgaatgggttactgctaaaccagttaagaagaacgtgctcaccatgctggatgaggcctatattcagccacagcctctgggagtggtgctgataatcggagcttggaattaccccttcgttctcaccattcagccactgataggagccatcgctgcaggaaatgctgtgattataaagccttctgaactgagtgaaaatacagccaagatcttggcaaagcttctccctcagtatttagaccaggatctctatattgttattaatggtggtgttgaggaaaccacggagctcctgaagcagcgatttgaccacattttctatacgggaaacactgcggttggcaaaattgtcatggaagctgctgccaagcatctgacccctgtgactcttgaactgggagggaaaagtccatgttatattgataaagattgtgacctggacattgtttgcagacgcataacctggggaaaatacatgaattgtggccaaacctgcattgcacccgactatattctctgtgaagcatccctccaaaatcaaattgtatggaagattaaggaaacagtgaaggaattttatggagaaaatataaaagagtctcctgattatgaaaggatcatcaatcttcgtcattttaagaggatactaagtttgcttgaaggacaaaagatagcttttggtggggagactgatgaggccacacgctacatagccccaacagtacttaccgatgttgatcctaaaaccaaggtgatgcaagaagaaatttttggaccaattcttccaatagtgcctgtgaaaaatgtagatgaggccataaatttcataaatgaacgtgaaaagcctctggctctttatgtattttcgcataaccataagctcatcaaacggatgattgatgagacatccagtggaggtgtcacaggcaatgacgtcattatgcacttcacgctcaactctttcccatttggaggagtgggttccagtgggatgggagcttatcacggaaaacatagttttgatactttttctcatcagcgtccctgtttattaaaaagtttaaagagagaaggtgctaacaaactcagatatcctcccaacagccagtcaaaggtggattggggaaaattttttctcttgaaacggttcaacaaagaaaaactcggtctcctgttgctcactttcctgggtattgtagccgctgtgcttgtcaaggcagaatattactgaagaatgatcctgttcaacctcctagtgcctctactgaattattcctcttttaaatggttaatgaaccaataatttttaaatcataccaaaaatagtaagaaaatatgcaaacactctgtgatcaaacttaaaagtcattgccattcatcattaataaaagttgccatttcaactacgtcccaacattccctaatagggtattcagggaacctgtcttaaattgtgcttatctaaatcttggaactttgagctaggggaggagaatgtattagactaaatacaaactgcggggttgtaagggagtctcagaacctcactgaatccttcactccagttaatggcactgctcacttcctgcctctgctgccaccatcactgtgtgaagctttcaagagcttggtacttcccagggctaccggcagtcctctgtagtccagagaggtgagattagatcttcttggttccctgtgaggtttcaggcactaaaactctatgtggggaagggaggggttactcctcctccaatgggactcaaggacttgacctccaggagtaggcccctggtcagaagtgccatctcaccagtggtcttcattcttcctcattcattctttatcatcctgtgttctgtttagttgcaacaatctcttgtgactaatgtcactcaaagcatcttgtaaatcctagggcttcctggaagttagttgccaaagtcatgcaagcatcacctgtcattcttgtgttggagttatagaattctacatcttataaaacctaactggcatttaaaaaatactgtggccgggcgtggtggctcatgcctgtaatcccagcactttgggaggccgaggtgggaggattgcttgagtccaggaatttgagaccagcctggacaacacagtgagacctcatctctatcaaaaaataaaaattagctagatgtggtggcatgagcctgtgttcccagctgcttaggaggctgaagcaggaggattgattgagcctgcgaggccaaggctgcagcaggctgtgattgcaccactgcacttcagcttgggcaacagagcaagaccctgtctccgaaacaaataaaaaatactgtaataaaagtacttataaacatactaatcctctttcaggaccctaaagttgcaggttagtaggtcttcaaggacaaatctgtaagtttcttatttctgtagtgcaagtaaaatttcactttttgaaactatagagagatccctttctgattagcctacagaacttaaagtgagggaaccatttcctctcacagacaaagaggcctgggatattaggactttggggtttgagagcatcatggggcagacagatggtggatggtctggacaagaagcgagtaagccactgcggttggtcatactgaagggaattgatggcaagaggatcccctgagcaagtcagaagttactctcatcagtcgttcatggtcacaacctgaggtactctgctgagtgggcaaggctgaagaagaggcctgtggaatgcagcattacctgctggacagagcagggcaggcagttctatgccttggagctcctgactgcagggactctgtccccacactcaaaaagactcagctcactcaatgagagaatgtgatttactttatagaacgtataatcaactttgttgaataatttgttctattaaggctgtctaaagtatgtgatgtcttcatcatagtatgaagtgttgaaaattaataacgagcctagtttaggaaaaagctgcttaaaactgtggctctaagagagtaatcataaaataccttagataaaattgcactatggaattttcattgagtatgtttaaattattggcttgtctactaatacacatctgcttcaaaatgaacatatttcataaaattggcatcaattttaatgacgctcctggtatggaacctcagatataccctattggagacaatcctttgatcataaattctccccaactataaatcattttatgtctttatcataga

SEQ ID NO: 8231 - protein, 485 aa, Homo sapiens; identical to SEQ ID NO: 1146

SEQ ID NO: 8232 - DNA, 1853 bp, Homo sapiens
agtcctcccccggcgcctccgactggcagtgggactcagcgggcgtggaggtcgcggctgagcgagcgagccctgggcgagtgaattgtggctgtgggttgacggtggagacaccccccggagggaggcggagggaagggaggcgaggcctgcacctgcatgcttcccgcctcccactccccagcgcccccggaccgtgcagttctctgcaggaccaggccatggagctcgaagtccggcgggtccgacaggcgttcctgtccggccggtcgcgacctctgcggtttcggctgcagcagctggaggccctgcggaggatggtgcaggagcgcgagaaggatatcctgacggccatcgccgccgacctgtgcaagagtgaattcaatgtgtacagtcaggaagtcattactgtccttggggaaattgattttatgcttgagaatcttcctgaatgggttactgctaaaccagttaagaagaacgtgctcaccatgctggatgaggcctatattcagccacagcctctgggagtggtgctgataatcggagcttggaattaccccttcgttctcaccattcagccactgataggagccatcgctgcaggaaatgctgtgattataaagccttctgaactgagtgaaaatacagccaagatcttggcaaagcttctccctcagtatttagaccaggatctctatattgttattaatggtggtgttgaggaaaccacggagctcctgaagcagcgatttgaccacattttctatacgggaaacactgcggttggcaaaattgtcatggaagctgctgccaagcatctgacccctgtgactcttgaactgggagggaaaagtccatgttatattgataaagattgtgacctggacattgtttgcagacgcataacctggggaaaatacatgaattgtggccaaacctgcattgcacccgactatattctctgtgaagcatccctccaaaatcaaattgtatggaagattaaggaaacagtgaaggaattttatggagaaaatataaaagagtctcctgattatgaaaggatcatcaatcttcgtcattttaagaggatactaagtttgcttgaaggacaaaagatagcttttggtggggagactgatgaggccacacgctacatagccccaacagtacttaccgatgttgatcctaaaaccaaggtgatgcaagaagaaatttttggaccaattcttccaatagtgcctgtgaaaaatgtagatgaggccataaatttcataaatgaacgtgaaaagcctctggctctttatgtattttcgcataaccataagctcatcaaacggatgattgatgagacatccagtggaggtgtcacaggcaatgacgtcattatgcacttcacgctcaactctttcccatttggaggagtgggttccagtgggatgggagcttatcacggaaaacatagttttgatactttttctcatcagcgtccctgtttattaaaaagtttaaagagagaaggtgctaacaaactcagatatcctcccaacagccagtcaaaggtggattggggaaaattttttctcttgaaacggttcaacaaagaaaaactcggtctcctgttgctcactttcctgggtattgtagccgctgtgcttgtcaaggcagaatattactgaagaatgatcctgttcaacctcctagtgcctctactgaattattcctcttttaaatggttaatgaaccaataatttttaaatcataccaaaaatagtaagaaaatatgcaaacactctgtgatcaaacttaaaagtcattgccattcatcattaataaaagttgccatttcaact

SEQ ID NO: 8233 - protein, 485 aa, Homo sapiens; identical to SEQ ID NO: 1146

SEQ ID NO: 8234 - DNA, 3518 bp, Homo sapiens
agtcctcccccggcgcctccgactggcagtgggactcagcgggcgtggaggtcgcggctgagcgagcgagccctgggcgagtgaattgtggctgtgggttgacggtggagacaccccccggagggaggcggagggaagggaggcgaggcctgcacctgcatgcttcccgcctcccactccccagcgcccccggaccgtgcagttctctgcaggaccaggccatggagctcgaagtccggcgggtccgacaggcgttcctgtccggccggtcgcgacctctgcggtttcggctgcagcagctggaggccctgcggaggatggtgcaggagcgcgagaaggatatcctgacggccatcgccgccgacctgtgcaagagtgaattcaatgtgtacagtcaggaagtcattactgtccttggggaaattgattttatgcttgagaatcttcctgaatgggttactgctaaaccagttaagaagaacgtgctcaccatgctggatgaggcctatattcagccacagcctctgggagtggtgctgataatcggagcttggaattaccccttcgttctcaccattcagccactgataggagccatcgctgcaggaaatgctgtgattataaagccttctgaactgagtgaaaatacagccaagatcttggcaaagcttctccctcagtatttagaccaggatctctatattgttattaatggtggtgttgaggaaaccacggagctcctgaagcagcgatttgaccacattttctatacgggaaacactgcggttggcaaaattgtcatggaagctgctgccaagcatctgacccctgtgactcttgaactgggagggaaaagtccatgttatattgataaagattgtgacctggacattgtttgcagacgcataacctggggaaaatacatgaattgtggccaaacctgcattgcacccgactatattctctgtgaagcatccctccaaaatcaaattgtatggaagattaaggaaacagtgaaggaattttatggagaaaatataaaagagtctcctgattatgaaaggatcatcaatcttcgtcattttaagaggatactaagtttgcttgaaggacaaaagatagcttttggtggggagactgatgaggccacacgctacatagccccaacagtacttaccgatgttgatcctaaaaccaaggtgatgcaagaagaaatttttggaccaattcttccaatagtgcctgtgaaaaatgtagatgaggccataaatttcataaatgaacgtgaaaagcctctggctctttatgtattttcgcataaccataagctcatcaaacggatgattgatgagacatccagtggaggtgtcacaggcaatgacgtcattatgcacttcacgctcaactctttcccatttggaggagtgggttccagtgggatgggagcttatcacggaaaacatagttttgatactttttctcatcagcgtccctgtttattaaaaagtttaaagagagaaggtgctaacaaactcagatatcctcccaacagccagtcaaaggtggattggggaaaattttttctcttgaaacggttcaacaaagaaaaactcggtctcctgttgctcactttcctgggtattgtagccgctgtgcttgtcaaggcagaatattactgaagaatgatcctgttcaacctcctagtgcctctactgaattattcctcttttaaatggttaatgaaccaataatttttaaatcataccaaaaatagtaagaaaatatgcaaacactctgtgatcaaacttaaaagtcattgccattcatcattaataaaagttgccatttcaactacgtcccaacattccctaatagggtattcagggaacctgtcttaaattgtgcttatctaaatcttggaactttgagctaggggaggagaatgtattagactaaatacaaactgcggggttgtaagggagtctcagaacctcactgaatccttcactccagttaatggcactgctcacttcctgcctctgctgccaccatcactgtgtgaagctttcaagagcttggtacttcccagggctaccggcagtcctctgtagtccagagaggtgagattagatcttcttggttccctgtgaggtttcaggcactaaaactctatgtggggaagggaggggttactcctcctccaatgggactcaaggacttgacctccaggagtaggcccctggtcagaagtgccatctcaccagtggtcttcattcttcctcattcattctttatcatcctgtgttctgtttagttgcaacaatctcttgtgactaatgtcactcaaagcatcttgtaaatcctagggcttcctggaagttagttgccaaagtcatgcaagcatcacctgtcattcttgtgttggagttatagaattctacatcttataaaacctaactggcatttaaaaaatactgtggccgggcgtggtggctcatgcctgtaatcccagcactttgggaggccgaggtgggaggattgcttgagtccaggaatttgagaccagcctggacaacacagtgagacctcatctctatcaaaaaataaaaattagctagatgtggtggcatgagcctgtgttcccagctgcttaggaggctgaagcaggaggattgattgagcctgcgaggccaaggctgcagcaggctgtgattgcaccactgcacttcagcttgggcaacagagcaagaccctgtctccgaaacaaataaaaaatactgtaataaaagtacttataaacatactaatcctctttcaggaccctaaagttgcaggttagtaggtcttcaaggacaaatctgtaagtttcttatttctgtagtgcaagtaaaatttcactttttgaaactatagagagatccctttctgattagcctacagaacttaaagtgagggaaccatttcctctcacagacaaagaggcctgggatattaggactttggggtttgagagcatcatggggcagacagatggtggatggtctggacaagaagcgagtaagccactgcggttggtcatactgaagggaattgatggcaagaggatcccctgagcaagtcagaagttactctcatcagtcgttcatggtcacaacctgaggtactctgctgagtgggcaaggctgaagaagaggcctgtggaatgcagcattacctgctggacagagcagggcaggcagttctatgccttggagctcctgactgcagggactctgtccccacactcaaaaagactcagctcactcaatgagagaatgtgatttactttatagaacgtataatcaactttgttgaataatttgttctattaaggctgtctaaagtatgtgatgtcttcatcatagtatgaagtgttgaaaattaataacgagcctagtttaggaaaaagctgcttaaaactgtggctctaagagagtaatcataaaataccttagataaaattgcactatggaattttc

SEQ ID NO: 8235 - protein, 485 aa, Homo sapiens; identical to SEQ ID NO: 1146

SEQ ID NO: 8236 - DNA, 3812 bp, Homo sapiens
agtcctcccccggcgcctccgactggcagtgggactcagcgggcgtggaggtcgcggctgagcgagcgagccctgggcgagtgaattgtggctgtgggttgacggtggagacaccccccggagggaggcggagggaagggaggcgaggcctgcacctgcatgcttcccgcctcccactccccagcgcccccggaccgtgcagttctctgcaggaccaggccatggagctcgaagtccggcgggtccgacaggcgttcctgtccggccggtcgcgacctctgcggtttcggctgcagcagctggaggccctgcggaggatggtgcaggagcgcgagaaggatatcctgacggccatcgccgccgacctgtgcaagagtgaattcaatgtgtacagtcaggaagtcattactgtccttggggaaattgattttatgcttgagaatcttcctgaatgggttactgctaaaccagttaagaagaacgtgctcaccatgctggatgaggcctatattcagccacagcctctgggagtggtgctgataatcggagcttggaattaccccttcgttctcaccattcagccactgataggagccatcgctgcaggaaatgctgtgattataaagccttctgaactgagtgaaaatacagccaagatcttggcaaagcttctccctcagtatttagaccagccattttgttctaatagctgtgatgatccaatcaagaaagatgaaatggaagacagtgagatgtcaaggattgaataggacgtagaaccagaagatagaggttgaaggatctctatattgttattaatggtggtgttgaggaaaccacggagctcctgaagcagcgatttgaccacattttctatacgggaaacactgcggttggcaaaattgtcatggaagctgctgccaagcatctgacccctgtgactcttgaactgggagggaaaagtccatgttatattgataaagattgtgacctggacattgtttgcagacgcataacctggggaaaatacatgaattgtggccaaacctgcattgcacccgactatattctctgtgaagcatccctccaaaatcaaattgtatggaagattaaggaaacagtgaaggaattttatggagaaaatataaaagagtctcctgattatgaaaggatcatcaatcttcgtcattttaagaggatactaagtttgcttgaaggacaaaagatagcttttggtggggagactgatgaggccacacgctacatagccccaacagtacttaccgatgttgatcctaaaaccaaggtgatgcaagaagaaatttttggaccaattcttccaatagtgcctgtgaaaaatgtagatgaggccataaatttcataaatgaacgtgaaaagcctctggctctttatgtattttcgcataaccataagctcatcaaacggatgattgatgagacatccagtggaggtgtcacaggcaatgacgtcattatgcacttcacgctcaactctttcccatttggaggagtgggttccagtgggatgggagcttatcacggaaaacatagttttgatactttttctcatcagcgtccctgtttattaaaaagtttaaagagagaaggtgctaacaaactcagatatcctcccaacagccagtcaaaggtggattggggaaaattttttctcttgaaacggttcaacaaagaaaaactcggtctcctgttgctcactttcctgggtattgtagccgctgtgcttgtcaaggcagaatattactgaagaatgatcctgttcaacctcctagtgcctctactgaattattcctcttttaaatggttaatgaaccaataatttttaaatcataccaaaaatagtaagaaaatatgcaaacactctgtgatcaaacttaaaagtcattgccattcatcattaataaaagttgccatttcaactacgtcccaacattccctaatagggtattcagggaacctgtcttaaattgtgcttatctaaatcttggaactttgagctaggggaggagaatgtattagactaaatacaaactgcggggttgtaagggagtctcagaacctcactgaatccttcactccagttaatggcactgctcacttcctgcctctgctgccaccatcactgtgtgaagctttcaagagcttggtacttcccagggctaccggcagtcctctgtagtccagagaggtgagattagatcttcttggttccctgtgaggtttcaggcactaaaactctatgtggggaagggaggggttactcctcctccaatgggactcaaggacttgacctccaggagtaggcccctggtcagaagtgccatctcaccagtggtcttcattcttcctcattcattctttatcatcctgtgttctgtttagttgcaacaatctcttgtgactaatgtcactcaaagcatcttgtaaatcctagggcttcctggaagttagttgccaaagtcatgcaagcatcacctgtcattcttgtgttggagttatagaattctacatcttataaaacctaactggcatttaaaaaatactgtggccgggcgtggtggctcatgcctgtaatcccagcactttgggaggccgaggtgggaggattgcttgagtccaggaatttgagaccagcctggacaacacagtgagacctcatctctatcaaaaaataaaaattagctagatgtggtggcatgagcctgtgttcccagctgcttaggaggctgaagcaggaggattgattgagcctgcgaggccaaggctgcagcaggctgtgattgcaccactgcacttcagcttgggcaacagagcaagaccctgtctccgaaacaaataaaaaatactgtaataaaagtacttataaacatactaatcctctttcaggaccctaaagttgcaggttagtaggtcttcaaggacaaatctgtaagtttcttatttctgtagtgcaagtaaaatttcactttttgaaactatagagagatccctttctgattagcctacagaacttaaagtgagggaaccatttcctctcacagacaaagaggcctgggatattaggactttggggtttgagagcatcatggggcagacagatggtggatggtctggacaagaagcgagtaagccactgcggttggtcatactgaagggaattgatggcaagaggatcccctgagcaagtcagaagttactctcatcagtcgttcatggtcacaacctgaggtactctgctgagtgggcaaggctgaagaagaggcctgtggaatgcagcattacctgctggacagagcagggcaggcagttctatgccttggagctcctgactgcagggactctgtccccacactcaaaaagactcagctcactcaatgagagaatgtgatttactttatagaacgtataatcaactttgttgaataatttgttctattaaggctgtctaaagtatgtgatgtcttcatcatagtatgaagtgttgaaaattaataacgagcctagtttaggaaaaagctgcttaaaactgtggctctaagagagtaatcataaaataccttagataaaattgcactatggaattttcattgagtatgtttaaattattggcttgtctactaatacacatctgcttcaaaatgaacatatttcataaaattggcatcaattttaatgacgctcctggtatggaacctcagatataccctattggagacaatcctttgatcataaattctccccaactataaatcattttatgtctttatcataga

SEQ ID NO: 8237 - protein, 292 aa, Homo sapiens
MEAAAKHLTPVTLELGGKSPCYIDKDCDLDIVCRRITWGKYMNCGQTCIAPDYILCEASLQNQIVWKIKETVKEFYGENIKESPDYERIINLRHFKRILSLLEGQKIAFGGETDEATRYIAPTVLTDVDPKTKVMQEEIFGPILPIVPVKNVDEAINFINEREKPLALYVFSHNHKLIKRMIDETSSGGVTGNDVIMHFTLNSFPFGGVGSSGMGAYHGKHSFDTFSHQRPCLLKSLKREGANKLRYPPNSQSKVDWGKFFLLKRFNKEKLGLLLLTFLGIVAAVLVKAEYY

SEQ ID NO: 8238 - DNA, 508 bp, Homo sapiens
agcagcagcagagagcagagagcactgcaaccagacctgggctgctctgggggcggcgtcagccacactgatggtggggctcacggtcaggatcctagccaccaggcactagcaaagaagcttggaaatagaaagccaggagtggctgtccccagtatgcaaacacaccacggtctgccctgcaaaaacaccaatggggtctagtgcaggtggacactttgaaccactcctcaaaaaaagaactttggctgattccttgtggtgacactcagaggggtctgaacagacttgacaattctgttctggtcaagctggagttttcttctgtgacttggactgctctacagaagacatcagccaactgcacgagtcagagtccagggattgtcactattattaataatgtaaatggcttcaaatgggacactgcagataaaatcacaaaaaccactgttatattaaagattacacatttcctgggcacagcctgctgctcaagtctgtcata

SEQ ID NO: 8239 - protein, 124 aa, Homo sapiens
KARSGCPQYANTPRSALQKHQWGLVQVDTLNHSSKKELWLIPCGDTQRGLNRLDNSVLVKLEFSSVTWTALQKTSANCTSQSPGIVTIINNVNGFKWDTADKITKTTVILKITHFLGTACCSSL

SEQ ID NO: 8240 - DNA, 2272 bp, Homo sapiens
ggctcgctggacaaagctggccgtgcaggcgctcaggcgtgcagggtagccagtgccccggccaggaatggacagcctccaggacacagtggccctggaccatgggggctgctgccctgccctcagcaggctggttcccagaggctttgggactgagatgtggactctctttgccctttctggacccctgttcctgttccaggtgctgacttttatgatctacatcgtgagcactgtgttctgcgggcacctgggcaaggtggagctggcatcggtgaccctcgcggtggcctttgtcaatgtctgcggagtttctgtaggagttggtttgtcttcggcatgtgacaccttgatgtctcagagcttcggcagccccaacaagaagcacgtgggcgtgatcctgcagcggggcgcgctggtcctgctcctctgctgcctcccttgctgggcgctcttcctcaacacccagcacatcctgctgctcttccggcaggacccggacgtgtccaggttgacccaggactatgtaatgattttcattccaggacttccggtgatttttctttacaatctgctggcaaaatatttgcaaaatcagggatggctgaaggggcaggaggaggagtccccattccaaaccccgggtttgtccatcctccatccatctcactcacaccttagcagggccagttttcatttatttcagaagatcacctggccccaagtcctcagtggtgtggtgggcaactgtgtcaacggtgtggccaactatgccctggtttctgtgctgaacctgggggtcaggggctccgcctatgccaacatcatctcccagtttgcacagaccgtcttcctccttctctacattgtgctgaagaagctgcacctggagacgtgggcaggttggtccagccagtgcctgcaggactggggccccttcttctccctggctgtccccagcatgctcatgatctgtgttgagtggtgggcctatgagatcgggagcttcctcatggggctgctcagtgtggtggatctctctgcccaggctgtcatctacgaggtggccactgtgacctacatgattcccttggggctcagcatcggggtctgtgtccgagtggggatggctctgggggctgcggatactgtgcaggccaagcgctcggccgtctcgggcgtgctcagcatagttggcatttccctggtcctgggcaccctgataagcatcctgaaaaatcagctggggcatatttttaccaatgatgaagatgtcattgccctggtgagccaggtcttgccggtttatagtgtctttcacgtgtttgaggccatctgttgtgtctatggcggagttctgagaggaactgggaagcaggcctttggtgccgctgtgaatgccatcacatattacatcatcggcctaccactgggcatccttctgacctttgtggtcagaatgagaatcatgggcctctggctgggcatgctggcctgtgtcttcctggcaactgctgcctttgttgcttatactgcccggctggactggaagcttgctgcagaggaggctaagaaacattcaggccggcagcagcagcagagagcagagagcactgcaaccagacctgggcctgagaaagcagtcctatcttcagtggctacaggcagttcccctggcattaccttgacaacgtattcaaggtctgagtgccacgtggacttcttcaggactccagaggaggcccacgccctttcagctcctaccagcagactatcagtgaaacagctggtcatccgccgtggggctgctctgggggcggcgtcagccacactgatggtggggctcacggtcaggatcctagccaccaggcactagcaaagaagcttggaaatagaaagccaggagtggctgtccccagtatgcaaacacaccacggtctgccctgcaaaaacaccaatggggtctagtgcaggtggacactttgaaccactcctcaaaaaaagaactttggctgattccttgtggtgacactcagaggggtctgaacagacttgacaattctgttctggtcaagctggagttttcttctgtgacttggactgctctacagaagacatcagccaactgcacgagtcagagtccagggattgtcactattattaataatgtaaatggcttcaaatgggacactgcagataaaatcacaaaaaccactgttatattaaagattacacatttcctgggcacagcctgctgctcaagtctgtcata

SEQ ID NO: 8241 - protein, 602 aa, Homo sapiens; identical to SEQ ID NO: 1150

SEQ ID NO: 8242 - DNA, 2502 bp, Homo sapiens
ggctcgctggacaaagctggccgtgcaggcgctcaggcgtgcagggtagccagtgccccggccaggaatggacagcctccaggacacagtggccctggaccatgggggctgctgccctgccctcagcaggctggttcccagaggctttgggactgagatgtggactctctttgccctttctggacccctgttcctgttccaggtgctgacttttatgatctacatcgtgagcactgtgttctgcgggcacctgggcaaggtggagctggcatcggtgaccctcgcggtggcctttgtcaatgtctgcggagtttctgtaggagttggtttgtcttcggcatgtgacaccttgatgtctcagagcttcggcagccccaacaagaagcacgtgggcgtgatcctgcagcggggcgcgctggtcctgctcctctgctgcctcccttgctgggcgctcttcctcaacacccagcacatcctgctgctcttccggcaggacccggacgtgtccaggttgacccaggactatgtaatgattttcattccaggacttccggtgatttttctttacaatctgctggcaaaatatttgcaaaatcagaagatcacctggccccaagtcctcagtggtgtggtgggcaactgtgtcaacggtgtggccaactatgccctggtttctgtgctgaacctgggggtcaggggctccgcctatgccaacatcatctcccagtttgcacagaccgtcttcctccttctctacattgtgctgaagaagctgcacctggagacgtgggcaggttggtccagccagtgcctgcaggactggggccccttcttctccctggctgtccccagcatgctcatgatctgtgttgagtggtgggcctatgagatcgggagcttcctcatggggctgctcagtgtggtggatctctctgcccaggctgtcatctacgaggtggccactgtgacctacatgattcccttggggctcagcatcggggtctgtgtccgagtggggatggctctgggggctgcggatactgtgcaggccaagcgctcggccgtctcgggcgtgctcagcatagttggcatttccctggtcctgggcaccctgataagcatcctgaaaaatcagctggggcatatttttaccaatgatgaagatgtcattgccctggtgagccaggtcttgccggtttatagtgtctttcacgtgtttgaggccatctgtgtctatcctggagaatgctgcatgtgagacccaaggaatgtcattgtgttggttaagtaacttgcttagactgattctgtgactcctgtctcctctacaatgtacagctgctgatgtctcttgctcagttttttcccccttgttcttatttttttaagtctagctttctagtttaaaatgttctttctaggattaaaaatgtctgcagagcttagtgttcagccaattactggtcagagactgtgttcaacacctctgatagctagcaaagcttccattctctgctgacagatccatgtgtgggctagagacgtattcagagttccagctgttttcaatgtgtctatggcggagttctgagaggaactgggaagcaggcctttggtgccgctgtgaatgccatcacatattacatcatcggcctaccactgggcatccttctgacctttgtggtcagaatgagaatcatgggcctctggctgggcatgctggcctgtgtcttcctggcaactgctgcctttgttgcttatactgcccggctggactggaagcttgctgcagaggaggctaagaaacattcaggccggcagcagcagcagagagcagagagcactgcaaccagacctgggcctgagaaagcagtcctatcttcagtggctacaggcagttcccctggcattaccttgacaacgtattcaaggtctgagtgccacgtggacttcttcaggactccagaggaggcccacgccctttcagctcctaccagcagactatcagtgaaacagctggtcatccgccgtggggctgctctgggggcggcgtcagccacactgatggtggggctcacggtcaggatcctagccaccaggcactagcaaagaagcttggaaatagaaagccaggagtggctgtccccagtatgcaaacacaccacggtctgccctgcaaaaacaccaatggggtctagtgcaggtggacactttgaaccactcctcaaaaaaagaactttggctgattccttgtggtgacactcagaggggtctgaacagacttgacaattctgttctggtcaagctggagttttcttctgtgacttggactgctctacagaagacatcagccaactgcacgagtcagagtccagggattgtcactattattaataatgtaaatggcttcaaatgggacactgcagataaaatcacaaaaaccactgttatattaaagattacacatttcctgggcacagcctgctgctcaagtctgtcata

SEQ ID NO: 8243 - protein, 396 aa, Homo sapiens [sequence omitted]

SEQ ID NO: 8244 - DNA, 2282 bp, Homo sapiens
ggctcgctggacaaagctggccgtgcaggcgctcaggcgtgcagggtagccagtgccccggccaggaatggacagcctccaggacacagtggccctggaccatgggggctgctgccctgccctcagcaggctggttcccagaggctttgggactgagatgtggactctctttgccctttctggacccctgttcctgttccaggtgctgacttttatgatctacatcgtgagcactgtgttctgcgggcacctgggcaaggtggagctggcatcggtgaccctcgcggtggcctttgtcaatgtctgcggagtttctgtaggagttggtttgtcttcggcatgtgacaccttgatgtctcagagcttcggcagccccaacaagaagcacgtgggcgtgatcctgcagcggggcgcgctggtcctgctcctctgctgcctcccttgctgggcgctcttcctcaacacccagcacatcctgctgctcttccggcaggacccggacgtgtccaggttgacccaggactatgtaatgattttcattccaggacttccggtgatttttctttacaatctgctggcaaaatatttgcaaaatcagaagatcacctggccccaagtcctcagtggtgtggtgggcaactgtgtcaacggtgtggccaactatgccctggtttctgtgctgaacctgggggtcaggggctccgcctatgccaacatcatctcccagtttgcacagaccgtcttcctccttctctacattgtgctgaagaagctgcacctggagacgtgggcaggttggtccagccagtgcctgcaggactggggccccttcttctccctggctgtccccagcatgctcatgatctgtgttgagtggtgggcctatgagatcgggagcttcctcatggggctgctcagtgtggtggatctctctgcccaggctgtcatctacgaggtggccactgtgacctacatgagacacagccatcgtcttgcttatgcagcccatgtcactcggattcccttggggctcagcatcggggtctgtgtccgagtggggatggctctgggggctgcggatactgtgcaggccaagcgctcggccgtctcgggcgtgctcagcatagttggcatttccctggtcctgggcaccctgataagcatcctgaaaaatcagctggggcatatttttaccaatgatgaagatgtcattgccctggtgagccaggtcttgccggtttatagtgtctttcacgtgtttgaggccatctgttgtgtctatggcggagttctgagaggaactgggaagcaggcctttggtgccgctgtgaatgccatcacatattacatcatcggcctaccactgggcatccttctgacctttgtggtcagaatgagaatcatgggtatgtggtgtgaggaagtcgggagaggcctgggtggtcgtcggacattgttcccatcatcacttgtctcctccaggcctctggctgggcatgctggcctgtgtcttcctggcaactgctgcctttgttgcttatactgcccggctggactggaagcttgctgcagaggaggctaagaaacattcaggccggcagcagcagcagagagcagagagcactgcaaccagacctgggcctgagaaagcagtcctatcttcagtggctacaggcagttcccctggcattaccttgacaacgtattcaaggtctgagtgccacgtggacttcttcaggactccagaggaggcccacgccctttcagctcctaccagcagactatcagtgaaacagctggtcatccgccgtggggctgctctgggggcggcgtcagccacactgatggtggggctcacggtcaggatcctagccaccaggcactagcaaagaagcttggaaatagaaagccaggagtggctgtccccagtatgcaaacacaccacggtctgccctgcaaaaacaccaatggggtctagtgcaggtggacactttgaaccactcctcaaaaaaagaactttggctgattccttgtggtgacactcagaggggtctgaacagacttgacaattctgttctggtcaagctggagttttcttctgtgacttggactgctctacagaagacatcagccaactgcacgagtcagagtccagggattgtcactattattaataatgtaaatggcttcaaatgggacactgcagataaaatcacaaaaaccactgttatattaaagattacacatttcctgggcacagcctgctgctcaagtctgtcata

SEQ ID NO: 8245 - protein, 504 aa, Homo sapiens
MDSLQDTVALDHGGCCPALSRLVPRGFGTEMWTLFALSGPLFLFQVLTFMIYIVSTVFCGHLGKVELASVTLAVAFVNVCGVSVGVGLSSACDTLMSQSFGSPNKKHVGVILQRGALVLLLCCLPCWALFLNTQHILLLFRQDPDVSRLTQDYVMIFIPGLPVIFLYNLLAKYLQNQKITWPQVLSGVVGNCVNGVANYALVSVLNLGVRGSAYANIISQFAQTVFLLLYIVLKKLHLETWAGWSSQCLQDWGPFFSLAVPSMLMICVEWWAYEIGSFLMGLLSVVDLSAQAVIYEVATVTYMRHSHRLAYAAHVTRIPLGLSIGVCVRVGMALGAADTVQAKRSAVSGVLSIVGISLVLGTLISILKNQLGHIFTNDEDVIALVSQVLPVYSVFHVFEAICCVYGGVLRGTGKQAFGAAVNAITYYIIGLPLGILLTFVVRMRIMGMWCEEVGRGLGGRRTLFPSSLVSSRPLAGHAGLCLPGNCCLCCLYCPAGLEACCRGG

SEQ ID NO: 8246 - DNA, 2206 bp, Homo sapiens
ggctcgctggacaaagctggccgtgcaggcgctcaggcgtgcagggtagccagtgccccggccaggaatggacagcctccaggacacagtggccctggaccatgggggctgctgccctgccctcagcaggctggttcccagaggctttgggactgagatgtggactctctttgccctttctggacccctgttcctgttccaggtgctgacttttatgatctacatcgtgagcactgtgttctgcgggcacctgggcaaggtggagctggcatcggtgaccctcgcggtggcctttgtcaatgtctgcggagtttctgtaggagttggtttgtcttcggcatgtgacaccttgatgtctcagagcttcggcagccccaacaagaagcacgtgggcgtgatcctgcagcggggcgcgctggtcctgctcctctgctgcctcccttgctgggcgctcttcctcaacacccagcacatcctgctgctcttccggcaggacccggacgtgtccaggttgacccaggactatgtaatgattttcattccaggacttccggtgatttttctttacaatctgctggcaaaatatttgcaaaatcagaagatcacctggccccaagtcctcagtggtgtggtgggcaactgtgtcaacggtgtggccaactatgccctggtttctgtgctgaacctgggggtcaggggctccgcctatgccaacatcatctcccagtttgcacagaccgtcttcctccttctctacattgtgctgaagaagctgcacctggagacgtgggcaggttggtccagccagtgcctgcaggactggggccccttcttctccctggctgtccccagcatgctcatgatctgtgttgagtggtgggcctatgagatcgggagcttcctcatggggctgctcagtgtggtggatctctctgcccaggctgtcatctacgaggtggccactgtgacctacatgagacacagccatcgtcttgcttatgcagcccatgtcactcggattcccttggggctcagcatcggggtctgtgtccgagtggggatggctctgggggctgcggatactgtgcaggccaagcgctcggccgtctcgggcgtgctcagcatagttggcatttccctggtcctgggcaccctgataagcatcctgaaaaatcagctggggcatatttttaccaatgatgaagatgtcattgccctggtgagccaggtcttgccggtttatagtgtctttcacgtgtttgaggccatctgttgtgtctatggcggagttctgagaggaactgggaagcaggcctttggtgccgctgtgaatgccatcacatattacatcatcggcctaccactgggcatccttctgacctttgtggtcagaatgagaatcatgggcctctggctgggcatgctggcctgtgtcttcctggcaactgctgcctttgttgcttatactgcccggctggactggaagcttgctgcagaggaggctaagaaacattcaggccggcagcagcagcagagagcagagagcactgcaaccagacctgggcctgagaaagcagtcctatcttcagtggctacaggcagttcccctggcattaccttgacaacgtattcaaggtctgagtgccacgtggacttcttcaggactccagaggaggcccacgccctttcagctcctaccagcagactatcagtgaaacagctggtcatccgccgtggggctgctctgggggcggcgtcagccacactgatggtggggctcacggtcaggatcctagccaccaggcactagcaaagaagcttggaaatagaaagccaggagtggctgtccccagtatgcaaacacaccacggtctgccctgcaaaaacaccaatggggtctagtgcaggtggacactttgaaccactcctcaaaaaaagaactttggctgattccttgtggtgacactcagaggggtctgaacagacttgacaattctgttctggtcaagctggagttttcttctgtgacttggactgctctacagaagacatcagccaactgcacgagtcagagtccagggattgtcactattattaataatgtaaatggcttcaaatgggacactgcagataaaatcacaaaaaccactgttatattaaagattacacatttcctgggcacagcctgctgctcaagtctgtcata

SEQ ID NO: 8247 - protein, 580 aa, Homo sapiens
MDSLQDTVALDHGGCCPALSRLVPRGFGTEMWTLFALSGPLFLFQVLTFMIYIVSTVFCGHLGKVELASVTLAVAFVNVCGVSVGVGLSSACDTLMSQSFGSPNKKHVGVILQRGALVLLLCCLPCWALFLNTQHILLLFRQDPDVSRLTQDYVMIFIPGLPVIFLYNLLAKYLQNQKITWPQVLSGVVGNCVNGVANYALVSVLNLGVRGSAYANIISQFAQTVFLLLYIVLKKLHLETWAGWSSQCLQDWGPFFSLAVPSMLMICVEWWAYEIGSFLMGLLSVVDLSAQAVIYEVATVTYMRHSHRLAYAAHVTRIPLGLSIGVCVRVGMALGAADTVQAKRSAVSGVLSIVGISLVLGTLISILKNQLGHIFTNDEDVIALVSQVLPVYSVFHVFEAICCVYGGVLRGTGKQAFGAAVNAITYYIIGLPLGILLTFVVRMRIMGLWLGMLACVFLATAAFVAYTARLDWKLAAEEAKKHSGRQQQQRAESTATRPGPEKAVLSSVATGSSPGITLTTYSRSECHVDFFRTPEEAHALSAPTSRLSVKQLVIRRGAALGAASATLMVGLTVRILATRH

SEQ ID NO: 8248 - DNA, 2767 bp, Homo sapiens
tgtgcagctccgctcaaagtatctcaggttccggggcagaatcctggaaaacccaactcggagctgagtctgcaggtggctgcagggcggtgctgctgagtctgcagttaccaccacaaaaggagggcctgaaggcattgccaggagactatggaggactcacggagctctgacacccctcacctggaggaggtggcttccccccaccccccactctgcctgcaccacctttgcctggggcggccaatgcatggcagtggagtcagtaatcgcccttgctcctccccagggtcaaacccactggggtctggggattgaaattctgagaggagtgtaggaggagagtgtcttcccgaagaaaatgtaggaatgcattggcttctatcacaaaaatcctgggaatgttcctgagaagggattttggagatgctcggcctaggactggccctcgggaagatgacccgacctttgtcctgtgcagctgagtgctgaacactggtcagctctggataaagcctgatgtcaccgagctgatggcggggcgtctgcactgaacaccttccagcttggtgggggcacgggaaccagctgtcctcattaaaagtgacctggagtgagatggattcttctgcctatacctccacgtgtgggctccctgaacacccccatcgccatgggctcccaagaagtattgcttctggctgcagggctcactgcaatgctgcgacaggaggtgacaggccaaggccagcaggtgactgctctccccagaggccctgtcagctggaagcagctggtttcacataacagagaccccaggcccaggtcccctggatgcaggaggatttgcggctgcccttttggaagagttcctgttccaggtgctgacttttatgatctacatcgtgagcactgtgttctgcgggcacctgggcaaggtggagctggcatcggtgaccctcgcggtggcctttgtcaatgtctgcggagtttctgtaggagttggtttgtcttcggcatgtgacaccttgatgtctcagagcttcggcagccccaacaagaagcacgtgggcgtgatcctgcagcggggcgcgctggtcctgctcctctgctgcctcccttgctgggcgctcttcctcaacacccagcacatcctgctgctcttccggcaggacccggacgtgtccaggttgacccaggactatgtaatgattttcattccaggacttccggtgatttttctttacaatctgctggcaaaatatttgcaaaatcagaagatcacctggccccaagtcctcagtggtgtggtgggcaactgtgtcaacggtgtggccaactatgccctggtttctgtgctgaacctgggggtcaggggctccgcctatgccaacatcatctcccagtttgcacagaccgtcttcctccttctctacattgtgctgaagaagctgcacctggagacgtgggcaggttggtccagccagtgcctgcaggactggggccccttcttctccctggctgtccccagcatgctcatgatctgtgttgagtggtgggcctatgagatcgggagcttcctcatggggctgctcagtgtggtggatctctctgcccaggctgtcatctacgaggtggccactgtgacctacatgattcccttggggctcagcatcggggtctgtgtccgagtggggatggctctgggggctgcggatactgtgcaggccaagcgctcggccgtctcgggcgtgctcagcatagagatgtcattgccctggtgagccaggtcttgccggtttatagtgtctttcacgtgtttgaggccatctgttgtgtctatggcggagttctgagaggaactgggaagcaggcctttggtgccgctgtgaatgccatcacatattacatcatcggcctaccactgggcatccttctgacctttgtggtcagaatgagaatcatgggcctctggctgggcatgctggcctgtgtcttcctggcaactgctgcctttgttgcttatactgcccggctggactggaagcttgctgcagaggaggctaagaaacattcaggccggcagcagcagcagagagcagagagcactgcaaccagacctgggcctgagaaagcagtcctatcttcagtggctacaggcagttcccctggcattaccttgacaacgtattcaaggtctgagtgccacgtggacttcttcaggactccagaggaggcccacgccctttcagctcctaccagcagactatcagtgaaacagctggtcatccgccgtggggctgctctgggggcggcgtcagccacactgatggtggggctcacggtcaggatcctagccaccaggcactagcaaagaagcttggaaatagaaagccaggagtggctgtccccagtatgcaaacacaccacggtctgccctgcaaaaacaccaatggggtctagtgcaggtggacactttgaaccactcctcaaaaaaagaactttggctgattccttgtggtgacactcagaggggtctgaacagacttgacaattctgttctggtcaagctggagttttcttctgtgacttggactgctctacagaagacatcagccaactgcacgagtcagagtccagggattgtcactattattaataatgtaaatggcttcaaatgggacactgcagataaaatcacaaaaaccactgttatattaaagattacacatttcctgggcacagcctgctgctcaagtctgtcata

SEQ ID NO: 8249 - protein, 296 aa, Homo sapiens
MIYIVSTVFCGHLGKVELASVTLAVAFVNVCGVSVGVGLSSACDTLMSQSFGSPNKKHVGVILQRGALVLLLCCLPCWALFLNTQHILLLFRQDPDVSRLTQDYVMIFIPGLPVIFLYNLLAKYLQNQKITWPQVLSGVVGNCVNGVANYALVSVLNLGVRGSAYANIISQFAQTVFLLLYIVLKKLHLETWAGWSSQCLQDWGPFFSLAVPSMLMICVEWWAYEIGSFLMGLLSVVDLSAQAVIYEVATVTYMIPLGLSIGVCVRVGMALGAADTVQAKRSAVSGVLSIEMSLPW

SEQ ID NO: 8250 - DNA, 2538 bp, Homo sapiens
agatgcctctcttggttcccactgccctgctggtcttgaggcaggttgaggggggagtcacaggccatccctgcaaggaaaagcagagagggcaatttgggaaggtgacagaggaccctgtgggacgtcgagtcacagccttgctgggcacagtgactggcgtgcatagtgagctgctttcccaagcactgccacccctggctctcagatatgctgctgaaaggggtgacgggcagtggggggcttgggactccgccgaggtgtcctagctcccatccctatccccaggcccaggcccaggcccctccagcatgaaaggctagggaccgcactgccatggggtttgccaggcccctgtctcttgggaagccacccctcccagggaaaagcagggctgagggctgttcaggctctgccaccacctgctctgtgacttcgggcaggccaccaattcttctgaaaaacgggagtcactgtgggcaccatcacgcccgggtacaggacgcccagtggctcagctgccccagccaggctgccctgtcctggcctcagcacacctcccacagccactgcaggcagccctggaccttctcctgctgaggccttactgccaatccctctgggagaccagacacaacaggcagcggtctgggtgactcccaggaacctgtcctccctagtggctgaggcagtaggcttggcagcagggactcagtgccctaggaggcagggctcatcccacaagttgccatggtagcccctcctcctgccccttactcatcagccaggctgtaccgacacgggctgcccaggcagggggtggctcgctggacaaagctggccgtgcaggcgctcaggcgtgcagggtagccagtgccccggccaggaatggacagcctccaggacacagtggccctggaccatgggggctgctgccctgccctcagcaggctggttcccagaggctttgggactgagatgtggactctctttgccctttctggacccctgttcctgttccaggtgctgacttttatgatctacatcgtgagcactgtgttctgcgggcacctgggcaaggtggagctggcatcggtgaccctcgcggtggcctttgtcaatgtctgcggagtttctgtaggagttggtttgtcttcggcatgtgacaccttgatgtctcagagcttcggcagccccaacaagaagcacgtgggcgtgatcctgcagcggggcgcgctggtcctgctcctctgctgcctcccttgctgggcgctcttcctcaacacccagcacatcctgctgctcttccggcaggacccggacgtgtccaggttgacccaggactatgtaatgattttcattccaggacttccggtgatttttctttacaatctgctggcaaaatatttgcaaaatcaggtacaggtctttggtgtgtggggaggcccttctcccagcacactgccctattccagtgggaggggggcctggggctttccccttctctccaccatctgtgaaccagctcttgaaaggggtcacttccaacccacctgccatatcctgacctcccgcacagaggcaggtgagaggctgtgcgtcccagcctcttccaactcctcaacagggatggctgaaggggcaggaggaggagtccccattccaaaccccgggtttgtccatcctccatccatctcactcacaccttagcagggccagttttcatttatttcagaagatcacctggccccaagtcctcagtggtgtggtgggcaactgtgtcaacggtgtggccaactatgccctggtttctgtgctgaacctgggggtcaggggctccgcctatgccaacatcatctcccagtttgcacagaccgtcttcctccttctctacattgtgctgaagaagctgcacctggagacgtgggcaggttggtccagccagtgcctgcaggactggggccccttcttctccctggctgtccccagcatgctcatgatctgtgttgagtggtgggcctatgagatcgggagcttcctcatggggctgctcagtgtggtggatctctctgcccaggctgtcatctacgaggtggccactgtgacctacatggtaaggctcctgcaggggtgccttccccacatcccccacctgatggctggaggtgtcataggaggggggcaggctgtcacctgaagctatctctgtctcccgaaggaccctccccgggcctctcgtgcccaccaggtccagaccctgctcagcttacgccaggactcacacacaggtgcccacaacctgacgaccaagggtgatatttcactcacagatgttggaattttaaaaattaattagtatcattttaaaattgggagatttcacatcacaatcttatttttggattttctttaaaaatgcacattccaggctgggcgcagtggctcacgtgtgtaatcccagtactttgggaggctgagggcggatcacaaagccaggagttcaagaccaacctgggcaatatggtgaaaccccatctc

SEQ ID NO: 8251 - protein, 273 aa, Homo sapiens
MDSLQDTVALDHGGCCPALSRLVPRGFGTEMWTLFALSGPLFLFQVLTFMIYIVSTVFCGHLGKVELASVTLAVAFVNVCGVSVGVGLSSACDTLMSQSFGSPNKKHVGVILQRGALVLLLCCLPCWALFLNTQHILLLFRQDPDVSRLTQDYVMIFIPGLPVIFLYNLLAKYLQNQVQVFGVWGGPSPSTLPYSSGRGAWGFPLLSTICEPALERGHFQPTCHILTSRTEAGERLCVPASSNSSTGMAEGAGGGVPIPNPGFVHPPSISLTP

SEQ ID NO: 8252 - DNA, 1581 bp, Homo sapiens
gctggacaaagctggccgtgcaggcgctcaggcgtgcagggtagccagtgccccggccaggaatggacagcctccaggacacagtggccctggaccatgggggctgctgccctgccctcagcaggctggttcccagaggctttgggactgagatgtggactctctttgccctttctggacccctgttcctgttccaggtgctgacttttatgatctacatcgtgagcactgtgttctgcgggcacctgggcaaggtggagctggcatcggtgaccctcgcggtggccgtgagtacccagcttggcccagagcagggacgttctctccccaggcttctccaccgggttcccgggtgggcccgtcttgggtggctggtcagggatgggaagacacagcccacgtggctggacagctgccttcacaggtggaacctgagggccggagatggaggcggtctggccctggggcacacagcacatgaggctgctgagcagagcctctgccaccgctgcctgctgggcagcatttcctgaccctggctcagcccagatgcaggggcctctcttcaggcctcacctgacaagctcttgtttcctcctgtgtgtggcgccagtttgtcaatgtctgcggagtttctgtaggagttggtttgtcttcggcatgtgacaccttgatgtctcaggtgggtggcctcctggagctgggcaggaagccaggcaagggcagagccaattccacaggtgccatggagatggcaggtgggaggggcgcagccaggtgatctgggagcaatgggccctggggtcagctgcccctgccctacctccaaggaccacaggctgtcagggaaacagaccctcccctttgaaagagtctgggccaggagaaaggggtggagatggtggagacagttctctgatctcttgcccccagaggaggtcaccaagtagagaaagacaaccggttccccagcctcaatcctaagttcggctgcctacatgcaggcatgtgtcgaaggccaaggggacacagaaggaacctccctgcttgcaggggcctgcagtccagcaggggctgcccaggtggccatggggtcacaaagcggcaaggcctcacctctccctgggggttttagcttcacggtggacctgggctttgtcctggctccacttaacctgccgctgacatgtgatgaagccccatgtgccttcgtcctccttggagctttggaagaacagtggagacagtggtaggcccaggctcaggaaggccgctgtgccattacaggctgcgggcgccaggctgtggtcaccagaggccgccgggtccgccacacaccgctggcgccgctgacagcccgctccccgcgcgggatttaggaatgtcccgggcagtggaaacggctgacgcggggcgggctgttttgcagagcttcggcagccccaacaagaagcacgtgggcgtgatcctgcagcggggcgcgctggtcctgctcctctgctgcctcccttgctgggcgctcttcctcaacacccagcacatcctgctgctcttccggcaggacccggacgtgtccaggtg

SEQ ID NO: 8253 - protein, 156 aa, Homo sapiens
MDSLQDTVALDHGGCCPALSRLVPRGFGTEMWTLFALSGPLFLFQVLTFMIYIVSTVFCGHLGKVELASVTLAVAVSTQLGPEQGRSLPRLLHRVPGWARLGWLVRDGKTQPTWLDSCLHRWNLRAGDGGGLALGHTAHEAAEQSLCHRCLLGSIS

SEQ ID NO: 8254 - DNA, 911 bp, Homo sapiens
gacgcatcgcctgggggaaattcatgaacagtggccagacctgcgtggcccctgactacatcctctgtgacccctcgatccagaaccaaattgtggagaagctcaagaagtcactgaaagagttctacggggaagatgctaagaaatcccgggactatggaagaatcattagtgcccggcacttccagagggtgatgggcctgattgagggccagaaggtggcttatgggggcaccggggatgccgccactcgctacatagcccccaccatcctcacggacgtggacccccagtccccggtgatgcaagaggagatcttcgggcctgtgctgcccatcgtgtgcgtgcgcagcctggaggaggccatccagttcatcaaccagcgtgagaagcccctggccctctacatgttctccagcaacgacaaggtgattaagaagatgattgcagagacatccagtggtggggtggcggccaacgatgtcatcgtccacatcaccttgcactctctgcccttcgggggcgtggggaacagcggcatgggatcctaccatggcaagaagagcttcgagactttctctcaccgccgctcttgcctggtgaggcctctgatgaatgatgaaggcctgaaggtcagataccccccgagcccggccaagatgacccagcactgaggaggggttgctccgcctggcctggccatactgtgtcccatcggagtgcggaccaccctcactggctctcctggccctgggagaatcgctcctgcagccccagcccagccccactcctctgctgacctgctgacctgtgcacaccccactcccacatgggcccaggcctcaccattccaagtctccacccctttctagaccaataaagagacgaatacaattttctaactcagcaaa

SEQ ID NO: 8255 - protein, 216 aa, Homo sapiens
MNSGQTCVAPDYILCDPSIQNQIVEKLKKSLKEFYGEDAKKSRDYGRIISARHFQRVMGLIEGQKVAYGGTGDAATRYIAPTILTDVDPQSPVMQEEIFGPVLPIVCVRSLEEAIQFINQREKPLALYMFSSNDKVIKKMIAETSSGGVAANDVIVHITLHSLPFGGVGNSGMGSYHGKKSFETFSHRRSCLVRPLMNDEGLKVRYPPSPAKMTQH

SEQ ID NO: 8256 - DNA, 2078 bp, Homo sapiens
gttccaggagccccagttaccgggagaggctgtgtcaaagaatgaatggaacgcctactatgaggaggtggtgtacgtcctagaggagatcgagtacatgatccagaagctccctgagtgggccgcggatgagcccgtggagaagacgccccagactcagcaggacgagctctacatccactcggagccactgggcgtggtcctcgtcattggcacctggaactaccccttcaacctcaccatccagcccatggtgggcgccatcgctgcaggtgcatggccctgtgggaagggaagctgggggagcaccgtcccccagcgtggagccaagccaggatgggctcaggcctgtgttaagagtcctggggtcagataagggtttgctgggtctgtcacaggaggctgtggggaccaagctgtttagccaggcctcttggtgcctgaggtccagtcaggctcaggtgtccacacctggtgatacagagagggcctgccttcccccacccctgttggggggctggagcttctgtcacctaatatgcatcagggcttccttcctagaatgggccagcgctgttctaccaaccgggcccccagagcctctctcccctttctgcttttcctccaacatctcagcaactcagagggccaggtggtgcagctctggccagcgtgtgcccgtgtgtgtccctctgtcatgtgcccgtgcgtgctcctgggtgtgccccgtgacatgtgcttgtttgctaacaactcttccatccactgtcccgaggacacacaatggaggggaggcttcaggtgtggtccttgggagggcagagcctctggtgaagtaccctgggcataggcctggctcggtgtgctctgcagggaactcagtggtcctcaagccctcggagctgagtgagaacatggcgagcctgctggctaccatcatcccccagtacctggacaaggatctgtacccagtaatcaatgggggtgtccctgagaccacggagctgctcaaggagaggttcgaccatatcctgtacacgggcagcacgggggtggggaagatcatcatgacggctgctgccaagcacctgacccctgtcacgctggagctgggagggaagagtccctgctacgtggacaagaactgtgacctggacgtggcctgccgacgcatcgcctgggggaaattcatgaacagtggccagacctgcgtggcccctgactacatcctctgtgacccctcgatccagaaccaaattgtggagaagctcaagaagtcactgaaagagttctacggggaagatgctaagaaatcccgggactatggaagaatcattagtgcccggcacttccagagggtgatgggcctgattgagggccagaaggtggcttatgggggcaccggggatgccgccactcgctacatagcccccaccatcctcacggacgtggacccccagtccccggtgatgcaagaggagatcttcgggcctgtgctgcccatcgtgtgcgtgcgcagcctggaggaggccatccagttcatcaaccagcgtgagaagcccctggccctctacatgttctccagcaacgacaaggtgattaagaagatgattgcagagacatccagtggtggggtggcggccaacgatgtcatcgtccacatcaccttgcactctctgcccttcgggggcgtggggaacagcggcatgggatcctaccatggcaagaagagcttcgagactttctctcaccgccgctcttgcctggtgaggcctctgatgaatgatgaaggcctgaaggtcagataccccccgagcccggccaagatgacccagcactgaggaggggttgctccgcctggcctggccatactgtgtcccatcggagtgcggaccaccctcactggctctcctggccctgggagaatcgctcctgcagccccagcccagccccactcctctgctgacctgctgacctgtgcacaccccactcccacatgggcccaggcctcaccattccaagtctccacccctttctagaccaataaagagacgaatacaattttctaactcagcaaa

SEQ ID NO: 8257 - protein, 570 aa, Homo sapiens
MSPWRRRPRLSRTSSTSTRSHWAWSSSLAPGTTPSTSPSSPWWAPSLQVHGPVGREAGGAPSPSVEPSQDGLRPVLRVLGSDKGLLGLSQEAVGTKLFSQASWCLRSSQAQVSTPGDTERACLPPPLLGGWSFCHLICIRASFLEWASAVLPTGPPEPLSPFCFSSNISATQRARWCSSGQRVPVCVPLSCARACSWVCPVTCACLLTTLPSTVPRTHNGGEASGVVLGRAEPLVKYPGHRPGSVCSAGNSVVLKPSELSENMASLLATIIPQYLDKDLYPVINGGVPETTELLKERFDHILYTGSTGVGKIIMTAAAKHLTPVTLELGGKSPCYVDKNCDLDVACRRIAWGKFMNSGQTCVAPDYILCDPSIQNQIVEKLKKSLKEFYGEDAKKSRDYGRIISARHFQRVMGLIEGQKVAYGGTGDAATRYIAPTILTDVDPQSPVMQEEIFGPVLPIVCVRSLEEAIQFINQREKPLALYMFSSNDKVIKKMIAETSSGGVAANDVIVHITLHSLPFGGVGNSGMGSYHGKKSFETFSHRRSCLVRPLMNDEGLKVRYPPSPAKMTQH

SEQ ID NO: 8258 - DNA, 1541 bp, Homo sapiens
gaactccaagggctcaatggacgggaagcagggtccttaaatacgtcccctcttggctcttgccgttccaggagccccagttaccgggagaggctgtgtcaaagaatgaatggaacgcctactatgaggaggtggtgtacgtcctagaggagatcgagtacatgatccagaagctccctgagtgggccgcggatgagcccgtggagaagacgccccagactcagcaggacgagctctacatccactcggagccactgggcgtggtcctcgtcattggcacctggaactaccccttcaacctcaccatccagcccatggtgggcgccatcgctgcagggaactcagtggtcctcaagccctcggagctgagtgagaacatggcgagcctgctggctaccatcatcccccagtacctggacaaggatctgtacccagtaatcaatgggggtgtccctgagaccacggagctgctcaaggagaggttcgaccatatcctgtacacgggcagcacgggggtggggaagatcatcatgacggctgctgccaagcacctgacccctgtcacgctggagctgggagggaagagtccctgctacgtggacaagaactgtgacctggacgtggcctgccgacgcatcgcctgggggaaattcatgaacagtggccagacctgcgtggcccctgactacatcctctgtgacccctcgatccagaaccaaattgtggagaagctcaagaagtcactgaaagagttctacggggaagatgctaagaaatcccgggactatggaagaatcattagtgcccggcacttccagagggtgatgggcctgattgagggccagaaggtggcttatgggggcaccggggatgccgccactcgctacatagcccccaccatcctcacggacgtggacccccagtccccggtgatgcaagaggagatcttcgggcctgtgctgcccatcgtgtgcgtgcgcagcctggaggaggccatccagttcatcaaccagcgtgagaagcccctggccctctacatgttctccagcaacgacaaggtgattaagaagatgattgcagagacatccagtggtggggtggcggccaacgatgtcatcgtccacatcaccttgcactctctgcccttcgggggcgtggggaacagcggcatgggatcctaccatggcaagaagagcttcgagactttctctcaccgccgctcttgcctggtgaggcctctgatgaatgatgaaggcctgaaggtcagataccccccgagcccggccaagatgacccagcactgaggaggggttgctccgcctggcctggccatactgtgtcccatcggagtgcggaccaccctcactggctctcctggccctgggagaatcgctcctgcagccccagcccagccccactcctctgctgacctgctgacctgtgcacaccccactcccacatgggcccaggcctcaccattccaagtctccacccctttctagaccaataaagagacgaatacaattttctaactcagcaaa

SEQ ID NO: 8259 - protein, 380 aa, Homo sapiens
MIQKLPEWAADEPVEKTPQTQQDELYIHSEPLGVVLVIGTWNYPFNLTIQPMVGAIAAGNSVVLKPSELSENMASLLATIIPQYLDKDLYPVINGGVPETTELLKERFDHILYTGSTGVGKIIMTAAAKHLTPVTLELGGKSPCYVDKNCDLDVACRRIAWGKFMNSGQTCVAPDYILCDPSIQNQIVEKLKKSLKEFYGEDAKKSRDYGRIISARHFQRVMGLIEGQKVAYGGTGDAATRYIAPTILTDVDPQSPVMQEEIFGPVLPIVCVRSLEEAIQFINQREKPLALYMFSSNDKVIKKMIAETSSGGVAANDVIVHITLHSLPFGGVGNSGMGSYHGKKSFETFSHRRSCLVRPLMNDEGLKVRYPPSPAKMTQH

SEQ ID NO: 8260 - DNA, 1633 bp, Homo sapiens
cttgtcacgcaaacttcctgggcaggaactccaagggctcaatggacgggaagcagggtccttaaatacgtcccctcttggctcttgccgttccaggagccccagttaccgggagaggctgtgtcaaaggcgccatgagcaagatcagcgaggccgtgaagcgcgcccgcgccgccttcagctcgggcaggacccgtccgctgcagttccggatccagcagctggaggcgctgcagcgcctgatccaggagcaggagcaggagctggtgggcgcgctggccgcagacctgcacaagaatgaatggaacgcctactatgaggaggtggtgtacgtcctagaggagatcgagtacatgatccagaagctccctgagtgggccgcggatgagcccgtggagaagacgccccagactcagcaggacgagctctacatccactcggagccactgggcgtggtcctcgtcattggcacctggaactaccccttcaacctcaccatccagcccatggtgggcgccatcgctgcagggaactcagtggtcctcaagccctcggagctgagtgagaacatggcgagcctgctggctaccatcatcccccagtacctggacaaggatctgtacccagtaatcaatgggggtgtccctgagaccacggagctgctcaaggagaggttcgaccatatcctgtacacgggcagcacgggggtggggaagatcatcatgacggctgctgccaagcacctgacccctgtcacgctggagctgggagggaagagtccctgctacgtggacaagaactgtgacctggacgtggcctgccgacgcatcgcctgggggaaattcatgaacagtggccagacctgcgtggcccctgactacatcctctgtgacccctcgatccagaaccaaattgtggagaagctcaagaagtcactgaaagagttctacggggaagatgctaagaaatcccgggactatggaagaatcattagtgcccggcacttccagagggtgatgggcctgattgagggccagaaggtggcttatgggggcaccggggatgccgccactcgctacatagcccccaccatcctcacggacgtggacccccagtccccggtgatgcaagaggagatcttcgggcctgtgctgcccatcgtgtgcgtgcgcagcctggaggaggccatccagttcatcaaccagcgtgagaagcccctggccctctacatgttctccagcaacgacaagggaacagcggcatgggatcctaccatggcaagaagagcttcgagactttctctcaccgccgctcttgcctggtgaggcctctgatgaatgatgaaggcctgaaggtcagataccccccgagcccggccaagatgacccagcactgaggaggggttgctccgcctggcctggccatactgtgtcccatcggagtgcggaccaccctcactggctctcctggccctgggagaatcgctcctgcagccccagcccagccccactcctctgctgacctgctgacctgtgcacaccccactcccacatgggcccaggcctcaccattccaagtctccacccctttctagaccaataaagagacgaatacaattttctaactcagcaaa

SEQ ID NO: 8261 - protein, 396 aa, Homo sapiens
MSKISEAVKRARAAFSSGRTRPLQFRIQQLEALQRLIQEQEQELVGALAADLHKNEWNAYYEEVVYVLEEIEYMIQKLPEWAADEPVEKTPQTQQDELYIHSEPLGVVLVIGTWNYPFNLTIQPMVGAIAAGNSVVLKPSELSENMASLLATIIPQYLDKDLYPVINGGVPETTELLKERFDHILYTGSTGVGKIIMTAAAKHLTPVTLELGGKSPCYVDKNCDLDVACRRIAWGKFMNSGQTCVAPDYILCDPSIQNQIVEKLKKSLKEFYGEDAKKSRDYGRIISARHFQRVMGLIEGQKVAYGGTGDAATRYIAPTILTDVDPQSPVMQEEIFGPVLPIVCVRSLEEAIQFINQREKPLALYMFSSNDKGTAAWDPTMARRASRLSLTAALAW

SEQ ID NO: 8262 - DNA, 1541 bp, Homo sapiens
cttgtcacgcaaacttcctgggcaggaactccaagggctcaatggacgggaagcagggtccttaaatacgtcccctcttggctcttgccgttccaggagccccagttaccgggagaggctgtgtcaaaggcgccatgagcaagatcagcgaggccgtgaagcgcgcccgcgccgccttcagctcgggcaggacccgtccgctgcagttccggatccagcagctggaggcgctgcagcgcctgatccaggagcaggagcaggagctggtgggcgcgctggccgcagacctgcacaagaatgaatggaacgcctactatgaggaggtggtgtacgtcctagaggagatcgagtacatgatccagaagctccctgagtgggccgcggatgagcccgtggagaagacgccccagactcagcaggacgagctctacatccactcggagccactgggcgtggtcctcgtcattggcacctggaactaccccttcaacctcaccatccagcccatggtgggcgccatcgctgcagggaactcagtggtcctcaagccctcggagctgagtgagaacatggcgagcctgctggctaccatcatcccccagtacctggacaaggatctgtacccagtaatcaatgggggtgtccctgagaccacggagctgctcaaggagaggttcgaccatatcctgtacacgggcagcacgggggtggggaagatcatcatgacggctgctgccaagcacctgacccctgtcacgctggagctgggagggaagagtccctgctacgtggacaagaactgtgacctggacgtggcctgccgacgcatcgcctgggggaaattcatgaacagtggccagacctgcgtggcccctgactacatcctctgtgacccctcgatccagaaccaaattgtggagaagctcaagaagtcactgaaagagatcttcgggcctgtgctgcccatcgtgtgcgtgcgcagcctggaggaggccatccagttcatcaaccagcgtgagaagcccctggccctctacatgttctccagcaacgacaaggtgattaagaagatgattgcagagacatccagtggtggggtggcggccaacgatgtcatcgtccacatcaccttgcactctctgcccttcgggggcgtggggaacagcggcatgggatcctaccatggcaagaagagcttcgagactttctctcaccgccgctcttgcctggtgaggcctctgatgaatgatgaaggcctgaaggtcagataccccccgagcccggccaagatgacccagcactgaggaggggttgctccgcctggcctggccatactgtgtcccatcggagtgcggaccaccctcactggctctcctggccctgggagaatcgctcctgcagccccagcccagccccactcctctgctgacctgctgacctgtgcacaccccactcccacatgggcccaggcctcaccattccaagtctccacccctttctagaccaataaagagacgaatacaattttctaactcagcaaa

SEQ ID NO: 8263 - protein, 389 aa, Homo sapiens
MSKISEAVKRARAAFSSGRTRPLQFRIQQLEALQRLIQEQEQELVGALAADLHKNEWNAYYEEVVYVLEEIEYMIQKLPEWAADEPVEKTPQTQQDELYIHSEPLGVVLVIGTWNYPFNLTIQPMVGAIAAGNSVVLKPSELSENMASLLATIIPQYLDKDLYPVINGGVPETTELLKERFDHILYTGSTGVGKIIMTAAAKHLTPVTLELGGKSPCYVDKNCDLDVACRRIAWGKFMNSGQTCVAPDYILCDPSIQNQIVEKLKKSLKEIFGPVLPIVCVRSLEEAIQFINQREKPLALYMFSSNDKVIKKMIAETSSGGVAANDVIVHITLHSLPFGGVGNSGMGSYHGKKSFETFSHRRSCLVRPLMNDEGLKVRYPPSPAKMTQH

SEQ ID NO: 8264 - DNA, 1779 bp, Homo sapiens
cagaggtccagaggacgccacaccccacatttgaatatttttttttcttgtcacgcaaacttcctgggcaggaactccaagggctcaatggacgggaagcagggtccttaaatacgtcccctcttggctcttgccgttccaggagccccagttaccgggagaggctgtgtcaaaggcgccatgagcaagatcagcgaggccgtgaagcgcgcccgcgccgccttcagctcgggcaggacccgtccgctgcagttccggatccagcagctggaggcgctgcagcgcctgatccaggagcaggagcaggagctggtgggcgcgctggccgcagacctgcacaagaatgaatggaacgcctactatgaggaggtggtgtacgtcctagaggagatcgagtacatgatccagaagctccctgagtgggccgcggatgagcccgtggagaagacgccccagactcagcaggacgagctctacatccactcggagccactgggcgtggtcctcgtcattggcacctggaactaccccttcaacctcaccatccagcccatggtgggcgccatcgctgcagggaactcagtggtcctcaagccctcggagctgagtgagaacatggcgagcctgctggctaccatcatcccccagtacctggacaaggatctgtacccagtaatcaatgggggtgtccctgagaccacggagctgctcaaggagaggttcgaccatatcctgtacacgggcagcacgggggtggggaagatcatcatgacggctgctgccaagcacctgacccctgtcacgctggagctgggagggaagagtccctgctacgtggacaagaactgtgacctggacgtggcctgccgacgcatcgcctgggggaaattcatgaacagtggccagacctgcgtggcccctgactacatcctctgtgacccctcgatccagaaccaaattgtggagaagctcaagaagtcactgaaagagttctacggggaagatgctaagaaatcccgggactatggaagaatcattagtgcccggcacttccagagggtgatgggcctgattgagggccagaaggtggcttatgggggcaccggggatgccgccactcgctacatagcccccaccatcctcacggacgtggacccccagtccccggtgatgcaagaggagatcttcgggcctgtgctgcccatcgtgtgcgtgcgcagcctggaggaggccatccagttcatcaaccagcgtgagaagcccctggccctctacatgttctccagcaacgacaaggtgattaagaagatgattgcagagacatccagtggtggggtggcggccaacgatgtcatcgtccacatcaccttgcactctctgcccttcgggggcgtggggaacagcggcatgggatcctaccatggcaagaagagcttcgagactttctctcaccgccgctcttgcctggtgaggcctctgatgaatgatgaaggcctgaaggtcagataccccccgagcccggccaagatgacccagcactgaggaggggttgctccgcctggcctggccatactgtgtcccatcggagtgcggaccaccctcactggctctcctggccctgggagaatcgctcctgcagccccagcccagccccactcctctgctgacctgctgacctgtgcacaccccactcccacatgggcccaggcctcaccattccaagtctccacccctttctagaccaataaagagacgaatacaattttctaactcagcaaa

SEQ ID NO: 8265 - protein, 453 aa, Homo sapiens; identical to SEQ ID NO: 1152

SEQ ID NO: 8266 - DNA, 3468 bp, Homo sapiens
tatttgagacagagtctcgctctgtcgcccaggctggagtgtaatggcgcgatctcggctcactgcaacctccgcctcccgggttcaggcaattctcctgcctcagcctccccagtagctgggacaacaggcgtgtaccaccatgcccggctaattttgtatttttagtagagacagggtttcgccatgttggacaggctggtcttgaactcctgccctcaggagttcctcaggaggagttctcggcctctcagagtgctgggattacaggcatgagccacagcgccgggcctgctactgcacttttcaagaaatggctcaggacttctcatcttaaaccagaaacaacaaggaaacccattctgttgactttacagcttctgtgttgctcttcacagcccaagtttataaaagagacgcgttttccgccgtctgcatctcctcttctcacccctgctccccacaggaggccctgagcgcccagcagcccttggtcctgcatccccctccagacaactaaagggcctggctccctccaccctgcccggatccagctcccagtgcccgaatctatcccccctccccggatccatccccccctccccggatccattcccactgcctgaatctactctcccctgcccggctctattccccctacctggatccattccgttgcccatgcctggtcccttcaccggctctctcccctggggccgcaaacctacctgggcccccctctggcagaaaggggtcctctcagacccacaggtccaacggctaatcctggctctgcttcccctgggagccttctgcggctgcccccaccctgggctgggtgagtgacccccatcaccctggcagctgagcagtggggctccccactcgccccagctgcaggcgggccctggccctggaagctcactccggctctgtcgctgcagaatgaatggaacgcctactatgaggaggtggtgtacgtcctagaggagatcgagtacatgatccagaagctccctgagtgggccgcggatgagcccgtggagaagacgccccagactcagcaggacgagctctacatccactcggagccactgggcgtggtcctcgtcattggcacctggaactaccccttcaacctcaccatccagcccatggtgggcgccatcgctgcagggaactcagtggtcctcaagccctcggagctgagtgagaacatggcgagcctgctggctaccatcatcccccagtacctggacaaggatctgtacccagtaatcaatgggggtgtccctgagaccacggagctgctcaaggagaggttcgaccatatcctgtacacgggcagcacgggggtggggaagatcatcatgacggctgctgccaagcacctgacccctgtcacgctggagctgggagggaagagtccctgctacgtggacaagaactgtgacctggacgtggcctgccggtgagaggcacgggcctgctggctgcagcagtccttactctgctttccaagcacacatgactgcacctcatgctgtgggtccactctgagtaacacagacaccccctgcctcatggagcagtggtccttgcagaaacttacatgggggtaggggtggggaccacatgcacagaagacgtgtggggagtcccagaaggcttcctggagggggagaggtctaggctgagctctgtttgctgagtgcgcatcactggggaagtggtactccaagcagaggctgcagaaaaagcagctgtgggacgttcaggacacaaggaactgtactgggttcagccctctgatggggcagggcaatctgagttctggagagcaggcccagaggggagaagggccaccgctgctcggggtctggggcagaacccgtatctgcacctcctgaccctagccagggctctgaccacctccatatcccacatctgtggccccagagatgtaggggggcccgagtagcagtgacacctggctgtgcaggacaagggcgtgatcagggagcacggaggttgccctcaacagacgtcctctagaaattccccaccagtcgccggtgaacatgatcagggccattgggtctgctcggtccagtgtctagaagtgagcagaccgcttgggaggactcactggtggcaaggtcacagccgatggcttctgctgaccagagagctcaggggtctgcaaaacgagatgcaactcctggggaaccttttggatttagtccagtctgggattctcacagacgcatcgcctgggggaaattcatgaacagtggccagacctgcgtggcccctgactacatcctctgtgacccctcgatccagaaccaaattgtggagaagctcaagaagtcactgaaagagttctacggggaagatgctaagaaatcccgggactatggaagaatcattagtgcccggcacttccagagggtgatgggcctgattgagggccagaaggtggcttatgggggcaccggggatgccgccactcgctacatagcccccaccatcctcacggacgtggacccccagtccccggtgatgcaagaggagatcttcgggcctgtgctgcccatcgtgtgcgtgcgcagcctggaggaggccatccagttcatcaaccagcgtgagaagcccctggccctctacatgttctccagcaacgacaaggtgggtggtgggcctggggtgccctctgccagggtcctggggcccacagacctgggttcaaactgcagcttcactgttctctggctgtgtgaccttgggcaagtcactggatctttctgagctcctttcacctcgtctgtaagatcaggacagcagcatcacctgagggcactgaatgagcgatccttgcccagggccctgcacacaggcatgggggcggctgctgtcactctttgctcatgtggtgctgacagccacgcggtctgcaggaagagcaggagatggaggctaaggctctgcctccacctgctcctgtccttgtggctccaggctatacccaggcagggtcgggttgggggctggggcatcctgtgggcaggagactgaggccagtggctgggtcctggtgcaggtgattaagaagatgattgcagagacatccagtggtggggtggcggccaacgatgtcatcgtccacatcaccttgcactctctgcccttcgggggcgtggggaacagcggcatgggatcctaccatggcaagaagagcttcgagactttctctcaccgccgctcttgcctggtgaggcctctgatgaatgatgaaggcctgaaggtcagataccccccgagcccggccaagatgacccagcactgaggaggggttgctccgcctggcctggccatactgttcccacatgggcccaggcctcaccattccaagtctccacccctttctagaccaataaagagacgaatacaattttctaactcagc

SEQ ID NO: 8267 - protein, 213 aa, Homo sapiens
MASADQRAQGSAKRDATPGEPFGFSPVWDSHRRIAWGKFMNSGQTCVAPDYILCDPSIQNQIVEKLKKSLKEFYGEDAKKSRDYGRIISARHFQRVMGLIEGQKVAYGGTGDAATRYIAPTILTDVDPQSPVMQEEIFGPVLPIVCVRSLEEAIQFINQREKPLALYMFSSNDKVGGGPGVPSARVLGPTDLGSNCSFTVLWLCDLGQVTGSF

SEQ ID NO: 8268 - DNA, 2559 bp, Homo sapiens
cctcctggcccggcctccgcgtcccgcccgcagcgtcccccatttcaacttcctgctgccccgacaccctgaacttctggtcctccccattcctcagccccacgcaggaccacttggttctccacaccaggaaccagagcagcttggcaccccggagggcatggggggctctcccctccctcccagttctcacaggggctgttccgtccctcaccctgagcaagaccagacacctctgcattcgcagccccctgctgtccccacatgctgcctggggtccagcgctccggagcccatcctcccaccgactaccctctttgctcctgcacttttatttttattttattttatttatttatttgagacagagtctcgctctgtcgcccaggctggagtgtaatggcgcgatctcggctcactgcaacctccgcctcccgggttcaggcaattctcctgcctcagcctccccagtagctgggacaacaggcgtgtaccaccatgcccggctaattttgtatttttagtagagacagggtttcgccatgttggacaggctggtcttgaactcctgccctcaggagttcctcaggaggagttctcggcctctcagagtgctgggattacaggcatgagccacagcgccgggcctgctactgcacttttcaagaaatggctcaggacttctcatcttaaaccagaaacaacaaggaaacccattctgttgactttacagcttctgtgttgctcttcacagcccaagtttataaaagagacgcgttttccgccgtctgcatctcctcttctcacccctgctccccacaggaggccctgagcgcccagcagcccttggtcctgcatccccctccagacaactaaagggcctggctccctccaccctgcccggatccagctcccagtgcccgaatctatcccccctccccggatccatccccccctccccggatccattcccactgcctgaatctactctcccctgcccggctctattccccctacctggatccattccgttgcccatgcctggtcccttcaccggctctctcccctggggccgcaaacctacctgggcccccctctggcagaaaggggtcctctcagacccacaggtccaacggctaatcctggctctgcttcccctgggagccttctgcggctgcccccaccctgggctggaatgaatggaacgcctactatgaggaggtggtgtacgtcctagaggagatcgagtacatgatccagaagctccctgagtgggccgcggatgagcccgtggagaagacgccccagactcagcaggacgagctctacatccactcggagccactgggcgtggtcctcgtcattggcacctggaactaccccttcaacctcaccatccagcccatggtgggcgccatcgctgcagggaactcagtggtcctcaagccctcggagctgagtgagaacatggcgagcctgctggctaccatcatcccccagtacctggacaaggatctgtacccagtaatcaatgggggtgtccctgagaccacggagctgctcaaggagaggttcgaccatatcctgtacacgggcagcacgggggtggggaagatcatcatgacggctgctgccaagcacctgacccctgtcacgctggagctgggagggaagagtccctgctacgtggacaagaactgtgacctggacgtggcctgccgacgcatcgcctgggggaaattcatgaacagtggccagacctgcgtggcccctgactacatcctctgtgacccctcgatccagaaccaaattgtggagaagctcaagaagtcactgaaagagttctacggggaagatgctaagaaatcccgggactatggaagaatcattagtgcccggcacttccagagggtgatgggcctgattgagggccagaaggtggcttatgggggcaccggggatgccgccactcgctacatagcccccaccatcctcacggacgtggacccccagtccccggtgatgcaagaggagatcttcgggcctgtgctgcccatcgtgtgcgtgcgcagcctggaggaggccatccagttcatcaaccagcgtgagaagcccctggccctctacatgttctccagcaacgacaaggtgattaagaagatgattgcagagacatccagtggtggggtggcggccaacgatgtcatcgtccacatcaccttgcactctctgcccttcgggggcgtggggaacagcggcatgggatcctaccatggcaagaagagcttcgagactttctctcaccgccgctcttgcctggtgaggcctctgatgaatgatgaaggcctgaaggtcagataccccccgagcccggccaagaccaccctcactggctctcctggccctgggagaatcgctcctgcagccccagcccagccccactcctctgctgacctgctgacctgtgcacaccccactcccacatgggcccaggcctcaccattccaagtctccacccctttctagaccaataaagagacgaatacaattttctaactc

SEQ ID NO: 8269 - protein, 424 aa, Homo sapiens
MIQKLPEWAADEPVEKTPQTQQDELYIHSEPLGVVLVIGTWNYPFNLTIQPMVGAIAAGNSVVLKPSELSENMASLLATIIPQYLDKDLYPVINGGVPETTELLKERFDHILYTGSTGVGKIIMTAAAKHLTPVTLELGGKSPCYVDKNCDLDVACRRIAWGKFMNSGQTCVAPDYILCDPSIQNQIVEKLKKSLKEFYGEDAKKSRDYGRIISARHFQRVMGLIEGQKVAYGGTGDAATRYIAPTILTDVDPQSPVMQEEIFGPVLPIVCVRSLEEAIQFINQREKPLALYMFSSNDKVIKKMIAETSSGGVAANDVIVHITLHSLPFGGVGNSGMGSYHGKKSFETFSHRRSCLVRPLMNDEGLKVRYPPSPAKTTLTGSPGPGRIAPAAPAQPHSSADLLTCAHPTPTWAQASPFQVSTPF

SEQ ID NO: 8270 - DNA, 1011 bp, Homo sapiens
ggcccccagagcctctctcccctttctgcttttcctccaacatctcagcaactcagagggccaggtggtgcagctctggccagcgtgtgcccgtgtgtgtccctctgtcatgtgcccgtgcgtgctcctgggtgtgccccgtgacatgtgcttgtttgctaacaactcttccatccactgtcccgaggacacacaatggaggggaggcttcaggtgtggtccttgggagggcagagcctctggtgaagtaccctgggcataggcctggctcggtgtgctctgcagggaactcagtggtcctcaagccctcggagctgagtgagaacatggcgagcctgctggctaccatcatcccccagtacctggacaaggatctgtacccagtaatcaatgggggtgtccctgagaccacggagctgctcaaggagaggttcgaccatatcctgtacacgggcagcacgggggtggggaagatcatcatgacggctgctgccaagcacctgacccctgtcacgctggagctgggagggaagagtccctgctacgtggacaagaactgtgacctggacgtggcctgccgacgcatcgcctgggggaaattcatgaacagtggccagacctgcgtggcccctgactacatcctctgtgacccctcgatccagaaccaaattgtggagaagctcaagaagtcactgaaagagttctacggggaagatgctaagaaatcccgggactatggaagaatcattagtgcccggcacttccagagggtgatgggcctgattgagggccagaaggtggcttatgggggcaccggggatgccgccactcgctacatagcccccaccatcctcacggacgtggacccccagtccccggtgatgcaagaggagatcttcgggcctgtgctgcccatcgtgtgcgtgcgcagcctggaggaggccatccagttcatcaaccagcgtgagaagcccctggccctctacatgttctccagcaacgacaaggtgg

SEQ ID NO: 8271 - protein, 227 aa, Homo sapiens
MASLLATIIPQYLDKDLYPVINGGVPETTELLKERFDHILYTGSTGVGKIIMTAAAKHLTPVTLELGGKSPCYVDKNCDLDVACRRIAWGKFMNSGQTCVAPDYILCDPSIQNQIVEKLKKSLKEFYGEDAKKSRDYGRIISARHFQRVMGLIEGQKVAYGGTGDAATRYIAPTILTDVDPQSPVMQEEIFGPVLPIVCVRSLEEAIQFINQREKPLALYMFSSNDK

SEQ ID NO: 8272 - DNA, 824 bp, Homo sapiens
cttgtcacgcaaacttcctgggcaggaactccaagggctcaatggacgggaagcagggtccttaaatacgtcccctcttggctcttgccgttccaggagccccagttaccgggagaggctgtgtcaaaggcgccatgagcaagatcagcgaggccgtgaagcgcgcccgcgccgccttcagctcgggcaggacccgtccgctgcagttccggatccagcagctggaggcgctgcagcgcctgatccaggagcaggagcaggagctggtgggcgcgctggccgcagacctgcacaagaatgaatggaacgcctactatgaggaggtggtgtacgtcctagaggagatcgagtacatgatccagaagctccctgagtgggccgcggatgagcccgtggagaagacgccccagactcagcaggacgagctctacatccactcggagccactgggcgtggtcctcgtcattggcacctggaactaccccttcaacctcaccatccagcccatggtgggcgccatcgctgcagggaactcagtggtcctcaagccctcggagctgagtgagaacatggcgagcctgctggctaccatcatcccccagtacctggacaaggatctgtacccagtaatcaatgggggtgtccctgagaccacggagctgctcaaggagaggttcgaccatatcctgtacacgggcagcacgggggtggggaagatcatcatgacggctgctgccaagcacctgacccctgtcacgctggagctgggagggaagagtccctgctacgtggacaagaactgtgacctggacgtggcctgccgg

SEQ ID NO: 8273 - protein, 229 aa, Homo sapiens
MSKISEAVKRARAAFSSGRTRPLQFRIQQLEALQRLIQEQEQELVGALAADLHKNEWNAYYEEVVYVLEEIEYMIQKLPEWAADEPVEKTPQTQQDELYIHSEPLGVVLVIGTWNYPFNLTIQPMVGAIAAGNSVVLKPSELSENMASLLATIIPQYLDKDLYPVINGGVPETTELLKERFDHILYTGSTGVGKIIMTAAAKHLTPVTLELGGKSPCYVDKNCDLDVAC

SEQ ID NO: 8274 - DNA, 562 bp, Homo sapiens
aggagccccagttaccgggagaggctgtgtcaaagaatgaatggaacgcctactatgaggaggtggtgtacgtcctagaggagatcgagtacatgatccagaagctccctgagtgggccgcggatgagcccgtggagaagacgccccagactcagcaggacgagctctacatccactcggagccactgggcgtggtcctcgtcattggcacctggaactaccccttcaacctcaccatccagcccatggtgggcgccatcgctgcagggaactcagtggtcctcaagccctcggagctgagtgagaacatggcgagcctgctggctaccatcatcccccagtacctggacaaggatctgtacccagtaatcaatgggggtgtccctgagaccacggagctgctcaaggagaggttcgaccatatcctgtacacgggcagcacgggggtggggaagatcatcatgacggctgctgccaagcacctgacccctgtcacgctggagctgggagggaagagtccctgctacgtggacaagaactgtgacctggacgtggcctgccg

SEQ ID NO: 8275 - protein, 155 aa, Homo sapiens
MIQKLPEWAADEPVEKTPQTQQDELYIHSEPLGVVLVIGTWNYPFNLTIQPMVGAIAAGNSVVLKPSELSENMASLLATIIPQYLDKDLYPVINGGVPETTELLKERFDHILYTGSTGVGKIIMTAAAKHLTPVTLELGGKSPCYVDKNCDLDVA

SEQ ID NO: 8276 - DNA, 548 bp, Homo sapiens
ctggccctggaagctcactccggctctgtcgctgcagaatgaatggaacgcctactatgaggaggtggtgtacgtcctagaggagatcgagtacatgatccagaagctccctgagtgggccgcggatgagcccgtggagaagacgccccagactcagcaggacgagctctacatccactcggagccactgggcgtggtcctcgtcattggcacctggaactaccccttcaacctcaccatccagcccatggtgggcgccatcgctgcagggaactcagtggtcctcaagccctcggagctgagtgagaacatggcgagcctgctggctaccatcatcccccagtacctggacaaggatctgtacccagtaatcaatgggggtgtccctgagaccacggagctgctcaaggagaggttcgaccatatcctgtacacgggcagcacgggggtggggaagatcatcatgacggctgctgccaagcacctgacccctgtcacgctggagctgggagggaagagtccctgctacgtggacaagaactgtgacc

SEQ ID NO: 8277 - protein, 150 aa, Homo sapiens
MIQKLPEWAADEPVEKTPQTQQDELYIHSEPLGVVLVIGTWNYPFNLTIQPMVGAIAAGNSVVLKPSELSENMASLLATIIPQYLDKDLYPVINGGVPETTELLKERFDHILYTGSTGVGKIIMTAAAKHLTPVTLELGGKSPCYVDKNC

SEQ ID NO: 8278 - DNA, 377 bp, Homo sapiens
gttccaggagccccagttaccgggagaggctgtgtcaaagaatgaatggaacgcctactatgaggaggtggtgtacgtcctagaggagatcgagtacatgatccagaagctccctgagtgggccgcggatgagcccgtggagaagacgccccagactcagcaggacgagctctacatccactcggagccactgggcgtggtcctcgtcattggcacctggaactaccccttcaacctcaccatccagcccatggtgggcgccatcgctgcaggacacacaatggaggggaggcttcaggtgtggtccttgggagggcagagcctctggtgaagtaccctgggcataggcctggctcggtgtgctctgcagggaactc

SEQ ID NO: 8279 - protein, 77 aa, Homo sapiens
MIQKLPEWAADEPVEKTPQTQQDELYIHSEPLGVVLVIGTWNYPFNLTIQPMVGAIAAGHTMEGRLQVWSLGGQSLW

SEQ ID NO: 8280 - DNA, 617 bp, Homo sapiens
gaactccaagggctcaatggacgggaagcagggtccttaaatacgtcccctcttggctcttgccgttccaggagccccagttaccgggagaggctgtgtcaaaggcgccatgagcaagatcagcgaggccgtgaagcgcgcccgcgccgccttcagctcgggcaggacccgtccgctgcagttccggatccagcagctggaggcgctgcagcgcctgatccaggagcaggagcaggagctggtgggcgcgctggccgcagacctgcacaagaatgaatggaacgcctactatgaggaggtggtgtacgtcctagaggagatcgagtacatgatccagaagctccctgagtgggccgcggatgagcccgtggagaagacgccccagactcagcaggacgagctctacatccactcggagccactgggcgtggtcctcgtcattggcacctggaactaccccttcaacctcaccatccagcccatggtgggcgccatcgctgcaggtgcatggccctgtgggaagggaagctgggggagcaccgtcccccagcgtggagccaagccaggatgggctcaggcctgtgttaagagtcctggggtcagataagggtttgctg

SEQ ID NO: 8281 - protein, 165 aa, Homo sapiens [sequence omitted]

SEQ ID NO: 8282 - DNA, 691 bp, Homo sapiens
gccgggaaaggccctgccgcgagcacgctgccaagagcccccagcagcagttcggcttaggactcgggttgcggcgggtgtcaccttctcaggggctagcaaggcagccagggcccaggcgtctgagtgaggggcgggagaggaggcgaggcagaaagtggaccttccagcggaaaggccattttccccaaggccgagcccagggaagtcccttcctatagaattcaggcagggtgggaggcagggcgcgctcgtgcccctcagccagctgcaggtgctctctgtccccaggcgccatgagcaagatcagcgaggccgtgaagcgcgcccgcgccgccttcagctcgggcaggacccgtccgctgcagttccggatccagcagctggaggcgctgcagcgcctgatccaggagcaggagcaggagctggtgggcgcgctggccgcagacctgcacaagaatgaatggaacgcctactatgaggaggtggtgtacgtcctagaggagatcgagtacatgatccagaagctccctgagtgggccgcggatgagcccgtggagaagacgccccagactcagcaggacgagctctacatccactcggagccactgggcgtggtcctcgtcattggcacctggaactaccccttcaacctcaccatccagcccatggtgggcgccatcgctgcagg

SEQ ID NO: 8283 - protein, 130 aa, Homo sapiens
MSKISEAVKRARAAFSSGRTRPLQFRIQQLEALQRLIQEQEQELVGALAADLHKNEWNAYYEEVVYVLEEIEYMIQKLPEWAADEPVEKTPQTQQDELYIHSEPLGVVLVIGTWNYPFNLTIQPMVGAIA

SEQ ID NO: 8284 - DNA, 3455 bp, Homo sapiens
ggcgttgggcgccgccgcgaggcggggaagcgcggggccgcggcggtgcgggttctagggcgcggccatggaggtggtgggtgacttcgagtacagcaagagggatctcgtgggacacggggccttcgccgtggtcttccgggggcggcaccgccagaaaactgattgggaggtagctattaaaagtattaataaaaagaacttgtcaaaatcacaaatactgcttggaaaggaaattaaaatcttaaaggaacttcagcatgaaaatattgtagcactctatgatgttcaggaattacccaactctgtctttttggtgatggagtattgcaatggtggagacctcgcagattatttgcaagcgaaagggactctcagtgaagacacgatcagagtgtttctgcatcagattgctgctgccatgcgaatcctgcacagcaaaggaatcatccacagagatctcaaaccacagaacatcttgctgtcctatgccaatcgcagaaaatcaagtgtcagtggtattcgcatcaaaatagcggattttggttttgctcgttacctacatagtaacatgatggctgcaacactgtgtggatccccgatgtacatggctcctgaggttattatgtctcaacattatgatgctaaggctgacttgtggagcataggaacagtgatataccaatgcctagttggaaaaccaccttttcaggccaatagtcctcaagacttaaggatgttttatgaaaaaaacaggagcttaatgcctagtattcccagagaaacatcaccttatttggctaatctccttttgggtttgcttcagagaaaccaaaaagatagaatggactttgaagcattttttagccatccttttcttgagcaaggtccagtaaaaaaatcttgcccagttccagtgcccatgtattctggttctgtctctggaagctcctgtggcagctctccatcttgtcgttttgcttctccaccatcccttccagatatgcagcatattcaggaagaaaacttatcttccccaccattgggtcctcccaactatctacaagtttccaaagattctgccagtactagtagcaagaactcttcttgtgacacggatgactttgttttggtgccacacaacatctcgtcagaccactcatgtgatatgccagtggggactgctggcagacgtgcttcaaatgaattcttggtgtgtggagggcagtgtcagcctactgtgtcacctcacagcgaaacagcaccaattccagttcctactcaaataaggaattatcagcgcatagagcagaatcttacatctactgccagctcaggcacaaatgtacatggttctccaagatctgcagtggtacgaaggtccaacaccagccccatgggcttcctccggccgggatcatgctccccagtaccagcagacacagcacagacagttggacgaaggctctccactgggtcttctaggccttactcaccttcccctttggttggtaccattcctgagcaattcagtcagtgctgctgtgggcatcctcagggccatgactccaggagtagaaactcctcaggttctccagtgccacaagctcagtccccacagtctctcttatcgggtgctagactgcagagcgcccccaccctcactgacatctatcagaacaagcagaagctcagaaaacagcactctgaccccgtgtgcccatcccatactggggctgggtacagctactcgcctcagcccagtcggcctggcagccttggaacttctcccaccaagcacttggggtcctctccacggagttctgactggttctttaaaactcctttgccaacaatcattggctctcctactaagaccacagctcctttcaaaatccctaaaactcaagcatcttccaacctgttagccttggttactcgtcatgggcctgctgaagaacagtcgaaagatgggaatgagccacgggaatgtgcccattgcctcttagtgcaaggaagtgagaggcagcgggccgagcagcagagcaaggcagtgtttggcagatctgtcagtaccgggaagttatcagatcaacaaggaaagactcctatatgtcgacatcagggcagcacagacagtttaaatacagaacgaccaatggatatagctccggcaggagcctgtggtggtgttctggcacctcctgcaggtacagcagcaagttccaaggctgtcctcttcactgtagggtctcctccacacagtgcggcagcccccacttgtacccacatgttccttcgaacaagaacaacctcagtggggcccagcaactccgggggctctctttgtgccatgagtggccgcgtgtgcgtggggtccccgcctggcccaggcttcggctcttcccctccaggagcagaggcagctcccagcctgagatacgtgccttacggtgcttcaccccccagcctagaggggctcatcacctttgaagcccctgaactgccggaggagacgctgatggagcgggaacacacagacaccttacgccatctgaatgtgatgctgatgttcactgagtgtgtgctggacctgacagccatgaggggaggaaaccctgagctgtgcacatctgctgtgtccttgtaccagatccaggagagtgtggtggtggaccagatcagtcagctgagcaaagactgggggcgggtggagcagctggtgttgtacatgaaagcagcacagctgcttgcggcttctctgcatcttgccaaagcccagatcaagtccgggaaactgagcccatccacagctgtgaaacaagttgtcaagaatctgaacgaacgatataaattctgcatcaccatgtgcaagaaacttacagaaaagctgaatcgattcttctctgacaaacagaggtttattgatgaaatcaacagtgtgactgcagagaaactcatctataattgtgctgtagaaatggttcagtctgcagccctggatgagatgtttcagcagaccgaagatattgtttatcgctatcataaggcagcccttcttttggaaggcctaagtaggattctacaggaccctgcagatattgaaaatgtgcataaatataaatgtagtattgagagaagactgtcggcgctctgccatagcaccgcaaccgtgtgagcagcaggctcatcccgtggaccggtggtgggaacgtgaggaagaggggaaggaaggaagagcttttccatttggtgctccaatgtctcctgctggacccatctgcctagtggaaggcagcaaaatttcaagaaacaggtgaggttgagcagcttggtgcaaccccatggggcctggagttggagctcaacagcaatggatttcagagaccaccctgaaactcccagtaaaaaagacttgggagacatgttaataaactcaagcatttgatcgaccc

SEQ ID NO: 8285 - protein, 1036 aa, Homo sapiens
MEVVGDFEYSKRDLVGHGAFAVVFRGRHRQKTDWEVAIKSINKKNLSKSQILLGKEIKILKELQHENIVALYDVQELPNSVFLVMEYCNGGDLADYLQAKGTLSEDTIRVFLHQIAAAMRILHSKGIIHRDLKPQNILLSYANRRKSSVSGIRIKIADFGFARYLHSNMMAATLCGSPMYMAPEVIMSQHYDAKADLWSIGTVIYQCLVGKPPFQANSPQDLRMFYEKNRSLMPSIPRETSPYLANLLLGLLQRNQKDRMDFEAFFSHPFLEQGPVKKSCPVPVPMYSGSVSGSSCGSSPSCRFASPPSLPDMQHIQEENLSSPPLGPPNYLQVSKDSASTSSKNSSCDTDDFVLVPHNISSDHSCDMPVGTAGRRASNEFLVCGGQCQPTVSPHSETAPIPVPTQIRNYQRIEQNLTSTASSGTNVHGSPRSAVVRRSNTSPMGFLRPGSCSPVPADTAQTVGRRLSTGSSRPYSPSPLVGTIPEQFSQCCCGHPQGHDSRSRNSSGSPVPQAQSPQSLLSGARLQSAPTLTDIYQNKQKLRKQHSDPVCPSHTGAGYSYSPQPSRPGSLGTSPTKHLGSSPRSSDWFFKTPLPTIIGSPTKTTAPFKIPKTQASSNLLALVTRHGPAEEQSKDGNEPRECAHCLLVQGSERQRAEQQSKAVFGRSVSTGKLSDQQGKTPICRHQGSTDSLNTERPMDIAPAGACGGVLAPPAGTAASSKAVLFTVGSPPHSAAAPTCTHMFLRTRTTSVGPSNSGGSLCAMSGRVCVGSPPGPGFGSSPPGAEAAPSLRYVPYGASPPSLEGLITFEAPELPEETLMEREHTDTLRHLNVMLMFTECVLDLTAMRGGNPELCTSAVSLYQIQESVVVDQISQLSKDWGRVEQLVLYMKAAQLLAASLHLAKAQIKSGKLSPSTAVKQVVKNLNERYKFCITMCKKLTEKLNRFFSDKQRFIDEINSVTAEKLIYNCAVEMVQSAALDEMFQQTEDIVYRYHKAALLLEGLSRILQDPADIENVHKYKCSIERRLSALCHSTATV

SEQ ID NO: 8286 - DNA, 3907 bp, Homo sapiens
agtcgcgcgggagcgggtagcgcgcgcgagggcgttgggcgccgccgcgaggcggggaagcgcggggccgcggcggtgcgggttctagggcggcggccgtcgccgtcgcagcagcgccccgagcggggagggccgaggaggcccgacgagctggggatggagagtaccgggcccctcactgcctcagagcgcgtgtgcggctctgggcgcgcacagtgacggtgacggcacccctggcccggcagcgccgaggccgcttcgccagacagccagcggccggcggcaggccgggccatgagcggcaggggccgggccgggcctcgctgaccctggctccgcgcggcagcttccccagtttccgctccggtctctcggcatgagagtccgcccgggcccggggctgcggctgccccagacccgccgcacgctggcgcgctccgggcccgcggagccgcggtgctgatacctgcgccgcactgcgccgcccgcccgtccgctgtgtgccccgggggcgcggccatggaggtggtgggtgacttcgagtacagcaagagggatctcgtgggacacggggccttcgccgtggtcttccgggggcggcaccgccagaaaactgattgggaggtagctattaaaagtattaataaaaagaacttgtcaaaatcacaaatactgcttggaaaggaaattaaaatcttaaaggaacttcagcatgaaaatattgtagcactctatgatgttcaggaattacccaactctgtctttttggtgatggagtattgcaatggtggagacctcgcagattatttgcaagcgaaagggactctcagtgaagacacgatcagagtgtttctgcatcagattgctgctgccatgcgaatcctgcacagcaaaggaatcatccacagagatctcaaaccacagaacatcttgctgtcctatgccaatcgcagaaaatcaagtgtcagtggtattcgcatcaaaatagcggattttggttttgctcgttacctacatagtaacatgatggctgcaacactgtgtggatccccgatgtacatggctcctgaggttattatgtctcaacattatgatgctaaggctgacttgtggagcataggaacagtgatataccaatgcctagttggaaaaccaccttttcaggccaatagtcctcaagacttaaggatgttttatgaaaaaaacaggagcttaatgcctagtattcccagagaaacatcaccttatttggctaatctccttttgggtttgcttcagagaaaccaaaaagatagaatggactttgaagcattttttagccatccttttcttgagcaaggtccagtaaaaaaatcttgcccagttccagtgcccatgtattctggttctgtctctggaagctcctgtggcagctctccatcttgtcgttttgcttctccaccatcccttccagatatgcagcatattcaggaagaaaacttatcttccccaccattgggtcctcccaactatctacaagtttccaaagattctgccagtactagtagcaagaactcttcttgtgacacggatgactttgttttggtgccacacaacatctcgtcagaccactcatgtgatatgccagtggggactgctggcagacgtgcttcaaatgaattcttggtgtgtggagggcagtgtcagcctactgtgtcacctcacagcgaaacagcaccaattccagttcctactcaaataaggaattatcagcgcatagagcagaatcttacatctactgccagctcaggcacaaatgtacatggttctccaagatctgcagtggtacgaaggtccaacaccagccccatgggcttcctccggccgggatcatgctccccagtaccagcagacacagcacagacagttggacgaaggctctccactgggtcttctaggccttactcaccttcccctttggttggtaccattcctgagcaattcagtcagtgctgctgtgggcatcctcagggccatgactccaggagtagaaactcctcaggttctccagtgccacaagctcagtccccacagtctctcttatcgggtgctagactgcagagcgcccccaccctcactgacatctatcagaacaagcagaagctcagaaaacagcactctgaccccgtgtgcccatcccatactggggctgggtacagctactcgcctcagcccagtcggcctggcagccttggaacttctcccaccaagcacttggggtcctctccacggagttctgactggttctttaaaactcctttgccaacaatcattggctctcctactaagaccacagctcctttcaaaatccctaaaactcaagcatcttccaacctgttagccttggttactcgtcatgggcctgctgaagaacagtcgaaagatgggaatgagccacgggaatgtgcccattgcctcttagtgcaaggaagtgagaggcagcgggccgagcagcagagcaaggcagtgtttggcagatctgtcagtaccgggaagttatcagatcaacaaggaaagactcctatatgtcgacatcagggcagcacagacagtttaaatacagaacgaccaatggatatagctccggcaggagcctgtggtggtgttctggcacctcctgcaggtacagcagcaagttccaaggctgtcctcttcactgtagggtctcctccacacagtgcggcagcccccacttgtacccacatgttccttcgaacaagaacaacctcagtggggcccagcaactccgggggctctctttgtgccatgagtggccgcgtgtgcgtggggtccccgcctggcccaggcttcggctcttcccctccaggagcagaggcagctcccagcctgagatacgtgccttacggtgcttcaccccccagcctagaggggctcatcacctttgaagcccctgaactgccggaggagacgctgatggagcgggaacacacagacaccttacgccatctgaatgtgatgctgatgttcactgagtgtgtgctggacctgacagccatgaggggaggaaaccctgagctgtgcacatctgctgtgtccttgtaccagatccaggagagtgtggtggtggaccagatcagtcagctgagcaaagactgggggcgggtggagcagctggtgttgtacatgaaagcagcacagctgcttgcggcttctctgcatcttgccaaagcccagatcaagtccgggaaactgagcccatccacagctgtgaaacaagttgtcaagaatctgaacgaacgatataaattctgcatcaccatgtgcaagaaacttacagaaaagctgaatcgattcttctctgacaaacagaggtttattgatgaaatcaacagtgtgactgcagagaaactcatctataattgtgctgtagaaatggttcagtctgcagccctggatgagatgtttcagcagaccgaagatattgtttatcgctatcataaggcagcccttcttttggaaggcctaagtaggattctacaggaccctgcagatattgaaaatgtgcataaatataaatgtagtattgagagaagactgtcggcgctctgccatagcaccgcaaccgtgtgagcagcaggctcatcccgtggaccggtggtgggaacgtgaggaagaggggaaggaaggaagagcttttccatttggtgctccaatgtctcctgctggacccatctgcctagtggaaggcagcaaaatttcaagaaacaggtgaggttgagcagcttggtgcaaccccatggggcctggagttggagctcaacagcaatggatttcagagaccaccctgaaactcccagtaaaaaagacttgggagacatgttaataaactcaagcatttgatcgaccc

SEQ ID NO: 8287 - protein, 1036 aa, Homo sapiens; identical to SEQ ID NO: 8285

SEQ ID NO: 8288 - DNA, 5811 bp, Homo sapiens
tagcgcgcgcgagggcgttgggcgccgccgcgaggcggggaagcgcggggccgcggcggtgcgggttctagggcggcggccgtcgccgtcgcagcagcgccccgagcggggagggccgaggaggcccgacgagctggggatggagagtaccgggcccctcactgcctcagagcgcgtgtgcggctctgggcgcgcacagtgacggtgacggcacccctggcccggcagcgccgaggccgcttcgccagacagccagcggccggcggcaggccgggccatgagcggcaggggccgggccgggcctcgctgaccctggctccgcgcggcagcttccccagtttccgctccggtctctcggcatgagagtccgcccgggcccggggctgcggctgccccagacccgccgcacgctggcgcgctccgggcccgcggagccgcggtgctgatacctgcgccgcactgcgccgcccgcccgtccgctgtgtgccccgggggcgcggccatggaggtggtgggtgacttcgagtacagcaagagggatctcgtgggacacggggccttcgccgtggtcttccgggggcggcaccgccagaaaactgattgggaggtagctattaaaagtattaataaaaagaacttgtcaaaatcacaaatactgcttggaaaggaaattaaaatcttaaaggaacttcagcatgaaaatattgtagcactctatgatgttcaggaattacccaactctgtctttttggtgatggagtattgcaatggtggagacctcgcagattatttgcaagcgaaagggactctcagtgaagacacgatcagagtgtttctgcatcagattgctgctgccatgcgaatcctgcacagcaaaggaatcatccacagagatctcaaaccacagaacatcttgctgtcctatgccaatcgcagaaaatcaagtgtcagtggtattcgcatcaaaatagcggattttggttttgctcgttacctacatagtaacatgatggctgcaacactgtgtggatccccgatgtacatggctcctgaggttattatgtctcaacattatgatgctaaggctgacttgtggagcataggaacagtgatataccaatgcctagttggaaaaccaccttttcaggccaatagtcctcaagacttaaggatgttttatgaaaaaaacaggagcttaatgcctagtattcccagagaaacatcaccttatttggctaatctccttttgggtttgcttcagagaaaccaaaaagatagaatggactttgaagcattttttagccatccttttcttgagcaaggtccagtaaaaaaatcttgcccagttccagtgcccatgtattctggttctgtctctggaagctcctgtggcagctctccatcttgtcgttttgcttctccaccatcccttccagatatgcagcatattcaggaagaaaacttatcttccccaccattgggtcctcccaactatctacaagtttccaaagattctgccagtactagtagcaagaactcttcttgtgacacggatgactttgttttggtgccacacaacatctcgtcagaccactcatgtgatatgccagtggggactgctggcagacgtgcttcaaatgaattcttggtgtgtggagggcagtgtcagcctactgtgtcacctcacagcgaaacagcaccaattccagttcctactcaaataaggaattatcagcgcatagagcagaatcttacatctactgccagctcaggcacaaatgtacatggttctccaagatctgcagtggtacgaaggtccaacaccagccccatgggcttcctccggccgggatcatgctccccagtaccagcagacacagcacagacagttggacgaaggctctccactgggtcttctaggccttactcaccttcccctttggttggtaccattcctgagcaattcagtcagtgctgctgtgggcatcctcagggccatgactccaggagtagaaactcctcaggttctccagtgccacaagctcagtccccacagtctctcttatcgggtgctagactgcagagcgcccccaccctcactgacatctatcagaacaagcagaagctcagaaaacagcactctgaccccgtgtgcccatcccatactggggctgggtacagctactcgcctcagcccagtcggcctggcagccttggaacttctcccaccaagcacttggggtcctctccacggagttctgactggttctttaaaactcctttgccaacaatcattggctctcctactaagaccacagctcctttcaaaatccctaaaactcaagcatcttccaacctgttagccttggttactcgtcatgggcctgctgaagaacagtcgaaagatgggaatgagccacgggaatgtgcccattgcctcttagtgcaaggaagtgagaggcagcgggccgagcagcagagcaaggcagtgtttggcagatctgtcagtaccgggaagttatcagatcaacaaggaaagactcctatatgtcgacatcagggcagcacagacagtttaaatacagaacgaccaatggatatagctccggcaggagcctgtggtggtgttctggcacctcctgcaggtacagcagcaagttccaaggctgtcctcttcactgtagggtctcctccacacagtgcggcagcccccacttgtacccacatgttccttcgaacaagaacaacctcagtggggcccagcaactccgggggctctctttgtgccatgagtggccgcgtgtgcgtggggtccccgcctggcccaggcttcggctcttcccctccaggagcagaggcagctcccagcctgagatacgtgccttacggtgcttcaccccccagcctagaggggctcatcacctttgaagcccctgaactgccggaggagacgctgatggagcgggaacacacagacaccttacgccatctgaatgtgatgctgatgttcactgagtgtgtgctggacctgacagccatgaggggaggaaaccctgagctgtgcacatctgctgtgtccttgtaccagatccaggagagtgtggtggtggaccagatcagtcagctgagcaaagactgggggcgggtggagcagctggtgttgtacatgaaagcagcacagctgcttgcggcttctctgcatcttgccaaagcccagatcaagtccgggaaactgagcccatccacagctgtgaaacaagttgtcaagaatctgaacgaacgatataaattctgcatcaccatgtgcaagaaacttacagaaaagctgaatcgattcttctctgacaaacagaggtttattgatgaaatcaacagtgtgactgcagagaaactcatctataattgtgctgtagaaatggttcagtctgcagccctggatgagatgtttcagcagaccgaagatattgtttatcgctatcataaggcagcccttcttttggaaggcctaagtaggattctacaggaccctgcagatattgaaaatgtgcataaatataaatgtagtattgagagaagactgtcggcgctctgccatagcaccgcaaccgtgtgagcagcaggctcatcccgtggaccggtggtgggaacgtgaggtgatgcctttgggattacagcttgagttctgtcaccccatccccaggaaactgtagcttcttaactggtgactaccaaagaacaagcagtgatttgaaaaaggaaaaacaatccaaaaactacatatttgtaggaaatctgccttattggagaaaatcaccctttccctttttctttgtagaagcaggagcaagagtgtttggctcccagtttggacttggtgaataaatgtaccttagaactaggataatcggtacagttattcttaaagataattaaaaatgaaacaaagtgagtgctcgtcactgggttcatcagagcagtgtgtgaaattccatgtgtttgctgaggtgtaaaggtaaatgtattcacccctcatccaggcagtttgatatttggagtaagtttgtttaaatctgagcatgcatctttaaacagctcaggaagaaatagcttaagaagaagtgaaacatggatcttggaagaaattttgaaatcttcaatttgatcctaatatggatacatgttaatcttccaaaatctttcatattgcactaatttattaaaacaactgtgtattggattttgtaatttaactaaggcacaatggacttgtttaaaatattttacttgattgtatacatagaccctttccagaattcacatgtaatctccagtgaacttttaagtggttaaaacttgtattcatgtgaacctttgcacattttttttttttacttctttatctacacctacagattttctcagtaatgtttttgttagcttttggttccattttttattgtgcatgcagaatgtacattgatgcctgtgaccttaggtttattaaaggctaggtttatttgggcagtattagaaacaaaatcatggatcaagagatactcttgataatttgaatagggccaaaacaaagttggtgacctaaaggcttgttagtgatgtggagttcctacatgcagtgagtggaaaatgaagttcgttttctcttaggaaaatgggcagctgtcttctgcctaatgtgtatttttcatgttaattctgacagttcaccaaatagctagtcatggagaatgcaggcagttaacttaatatccctccaggaatggttcctacgttgtgtattacttggtttcttttacttacctgcttgaatacttgaataaaccattcaccaattttaatccttttattttaatccttttacataaaataatctgaactctttgacaaattgcacagagctctttggcattaatctaattttaatgtactgataaaaacaaacatggttttcctttactttgacaaagtaatgtaatttttaccttatttatctgtatgaaattccagtagttaatttgaacatttatttatatgacgtttgtatttttaggtctttaatacagtgtttctacctctcatttgtaactgcatgcattattcttgaaactaggtaaaactcactgaattgttgtgtaatagcctttttattattgcctgtacaaatgtatattaaggtaaaataaaactgacaaagtgtttctagggtgtagctgggtacatattaagtggcttgttgagccaggtacttccttagtgagtttagagacttggccatgaatatcctttgtcctgccccaggatttagatcttggctactgtcatgcaggcttccaggaacatagactgttttacctccacaaccctatttgttattagtgatactttattttatataatattttttattcacagtgaaatttcattcatgttctttcagttatcacctgtgttatctcagttgtaggtttattctatcctctcctcttcctctcccatttcttttttaagacaggatgaaacaggttcagagaggggaagtgattggcctaaagtcaggaactaggcaagtggtcaagccatgctttgtgactttcaagttaattcttcttgttcttgtatattaaaggtcttggggtagatggtgtgtgtgaaacagtgaagtctcaacagcagaaaagaacaaaatgtaaattcatgaataatggttctggttatacttccattatcaaggctaattaagagattttgccttgagtatagcaataataaacaaatgctttatgtttccctgag

SEQ ID NO: 8289 - protein, 1036 aa, Homo sapiens; identical to SEQ ID NO: 8285

SEQ ID NO: 8290 - DNA, 1450 bp, Homo sapiens
tttgagaaatctgatatctcttcatagtcttcaattattaaagttaaaaaaataaataaatgtgaatccaaattcctcattcccttcatgctctccttcacaacccaatcctgttgatggaatatgcagatggtatttgattttgtgtgcttaaatatttacgtgactccttttgtaccagcgaaagggactctcagtgaagacacgatcagagtgtttctgcatcagattgctgctgccatgcgaatcctgcacagcaaaggaatcatccacagagatgaaaatgaagttcgttttctcttaggaaaatgggcagctgtcttctgcctaatgtgtatttttcatgttaattctgacagttcaccaaatagctagtcatggagaatgcaggcagttaacttaatatccctccaggaatggttcctacgttgtgtattacttggtttcttttacttacctgcttgaatacttgaataaaccattcaccaattttaatccttttattttaatccttttacataaaataatctgaactctttgacaaattgcacagagctctttggcattaatctaattttaatgtactgataaaaacaaacatggttttcctttactttgacaaagtaatgtaatttttaccttatttatctgtatgaaattccagtagttaatttgaacatttatttatatgacgtttgtatttttaggtctttaatacagtgtttctacctctcatttgtaactgcatgcattattcttgaaactaggtaaaactcactgaattgttgtgtaatagcctttttattattgcctgtacaaatgtatattaaggtaaaataaaactgacaaagtgtttctagggtgtagctgggtacatattaagtggcttgttgagccaggtacttccttagtgagtttagagacttggccatgaatatcctttgtcctgccccaggatttagatcttggctactgtcatgcaggcttccaggaacatagactgttttacctccacaaccctatttgttattagtgatactttattttatataatattttttattcacagtgaaatttcattcatgttctttcagttatcacctgtgttatctcagttgtaggtttattctatcctctcctcttcctctcccatttcttttttaagacaggatgaaacaggttcagagaggggaagtgattggcctaaagtcaggaactaggcaagtggtcaagccatgctttgtgactttcaagttaattcttcttgttcttgtatattaaaggtcttggggtagatggtgtgtgtgaaacagtgaagtctcaacagcagaaaagaacaaaatgtaaattcatgaataatggttctggttatacttccattatcaaggctaattaagagattttgccttgagtatagcaataataaacaaatgctttatgtttccctgag

SEQ ID NO: 8291 - protein, 83 aa, Homo sapiens
MQMVFDFVCLNIYVTPFVPAKGTLSEDTIRVFLHQIAAAMRILHSKGIIHRDENEVRFLLGKWAAVFCLMCIFHVNSDSSPNS

SEQ ID NO: 8292 - DNA, 865 bp, Homo sapiens
tttgagaaatctgatatctcttcatagtcttcaattattaaagttaaaaaaataaataaatgtgaatccaaattcctcattcccttcatgctctccttcacaacccaatcctgttgatggaatatgcagatggtatttgattttgtgtgcttaaatatttacgtgactccttttgtaccagcgaaagggactctcagtgaagacacgatcagagtgtttctgcatcagattgctgctgccatgcgaatcctgcacagcaaaggaatcatccacagagatgaaaatgaagttcgttttctcttaggaaaatgggcagctgtcttctgcctaatgtgtatttttcatgttaattctgacagttcaccaaatagctagtcatggagaatgcaggcagttaacttaatatccctccaggaatggttcctacgttgtgtattacttggtttcttttacttacctgcttgaatacttgaataaaccattcaccaattttaatccttttattttaatccttttacataaaataatctgaactctttgacaaattgcacagagctctttggcattaatctaattttaatgtactgataaaaacaaacatggttttcctttactttgacaaagtaatgtaatttttaccttatttatctgtatgaaattccagtagttaatttgaacatttatttatatgacgtttgtatttttaggtctttaatacagtgtttctacctctcatttgtaactgcatgcattattcttgaaactaggtaaaactcactgaattgttgtgtaatagcctttttattattgcctgtacaaatgtatattaaggtaaaataaaactgacaaagtgtttctagggtgt

SEQ ID NO: 8293 - protein, 83 aa, Homo sapiens; identical to SEQ ID NO: 8291

SEQ ID NO: 8294 - DNA, 738 bp, Homo sapiens
gttagtgctattacatcttttctcaaatggagcatgcacatacactgtggatattctttttatgtgtaatgtttactaatgtagctgagatttgggggaaagaacatgatagttgggtcaaatggacctgcattcgggcctctgtccatatgttactgtgtaagctccagaaagaaatgtcacctctctgggccattttcctctgaacagtgagtatagcactatcaccttcttataccctatggtgttttggtgatgatacttgcaaacagagtacccattacaggtggataggcaataaatatttatttgatctgaatgccgtagacatgagcttggattttttttgtatgtggaatttctactgagggaggagtcacctctgagccagatttcactgacttagattctcttaatcatgatttctggcgctttaaggtggcttctactcaaacctcttcctttccctgaagctcccaaggcattttcttcatggctgtgttccctcccatctcagtacttcttcctaatcctgaggccttctggtcactctagtcacttcttcctatccatctcaataaaaaaaaacaaaccaaacaaaaaacagtaaacgggccgggtgtggtggttcatgcctataatcccagcactttggaagtctgaggcgggtggaccacttgaggtcaggagtttgagaccagcctggccaacatgccaaaaccctgtcttggtgttttt

SEQ ID NO: 8295 - protein, 63 aa, Homo sapiens
MISGALRWLLLKPLPFPEAPKAFSSWLCSLPSQYFFLILRPSGHSSHFFLSISIKKNKPNKKQ

SEQ ID NO: 8296 - DNA, 3443 bp, Homo sapiens
cacctgggagagccgaggcgagaagcgacacttccctgcggctagcatccttgaaggaccccggcggcgaacagcctcccgcaggacgccctgagaagctctcagccccaggcgagagcgggcgcctggcaggacttaggcgcaggacttggggaagcctaagcaggtctctgccgagcgcagcccagggagcagtaacaaggaagggtcctggaggggaagggaaagaaggcggcagccggcaaggcgaccactcacccccgtacacacccaccccgcccgcccagccaggagccgcggtgcgcctctgggggcgctcgttccttggcgccttctctcccgtgtcccagcaccgctgggctacgggccgggctggtggggtccctggggatgtccagatcaggcatggtggccgagtggcccttctcccaggaccagcgtaaaagctggggttaggcggggcaggggggactcggctcagggtcccccgaggtccaggacgagggaaggcgggcgcagcacccagggactggagaggcggctcccagtgggacccctccagaagtagtgccgggcgccgggcatcctccaggaagaccaggggccgggaaagcctgggaggcgctcgggagaggccactgccaggggctgcgggctgaggcggcgctcagccccgggcgggcgcccgcggaggcggcagcggcggcgccgggcgggcatgccgcgccaccggagctcctttcgggcgcacgcttccctggcgcgggctgcgcgcggctgccgctgctgctgcttccactgctgctgcggactcccatggcggctccgcccggccggggccgccgccgctgccgccagccgcgggctgaatgaatgagccggattggcggagccgggctgcccgcagccgcgctcaccggcccgggacgcttccgcatggcccgcgaggagccggcgcccgcggcgttggcggctgccgggcagcccgggggcggcagaggcggcgagcgggcgctgcaggggccaggggtcgcccgcagggggcggccatcgctgagccgcgctaaactgcacgggctgcggcacatgtgtgccgggcgcacggcggctgggggctccttccagcggcgggcgctgtgggtgctggccttctgtacatccttcggcttgctgctgtcctggtcctcgaaccgcttgctctactggctcagcttcccgtcacacacgcgggtgcaccgcgagtggagccgccagttacccttccccgccgtcactgtgtgcaacaacaacccgctgcgcttcccgcgcctctccaagggggacctctactatgccggccactggctcgggctgctgctgcccaaccgcaccgcgcgcccgcttgtcagcgagctgctgcggggcgacgagccgcgccgccagtggttccgcaagctggcggacttccgcctcttcctgcctccgcgccacttcgagggaatcagcgccgccttcatggaccgcctgggccaccagctggaggacatgctgctctcctgcaagtaccgcggcgagctctgcgggccgcacaacttctcctccgtgtttacaaaatatgggaagtgttacatgtttaactcaggcgaggatggcaaacctctgctcaccacggtcaagggggggacaggcaacgggctggagatcatgctggacattcagcaggatgagtacctgcccatctggggagagacagaggaaacgacatttgaagcaggagtgaaagttcagatccacagtcagtctgagccacctttcatccaagagctgggctttggggtggctccagggttccagacctttgtggccacacaggagcagaggctcacatacctgcccccaccgtggggtgagtgccgatcctcagagatgggcctcgacttttttcctgtttacagcatcaccgcctgtaggattgactgtgagacccgctacattgtggaaaactgcaactgccgcatggttcacatgccaggggatgcccctttttgtacccctgagcagcacaaggagtgtgcagagcctgccctaggtctgttggcggaaaaggacagcaattactgtctctgcaggacaccctgcaacctaacccgctacaacaaagagctctccatggtgaagatccccagcaagacatcagccaagtaccttgagaagaaatttaacaaatcagaaaaatatatctcagagaacatccttgttctggatatattttttgaagctctcaattatgagacaattgaacagaagaaggcgtatgaagttgctgccttacttggtgatattggtggtcagatgggattgttcattggtgctagtatccttacaatactagagctctttgattatatttatgagctgatcaaagagaagctattagacctgcttggcaaagaggaggacgaagggagccacgatgagaatgtgagtacttgtgacacaatgccaaaccactctgaaaccatcagtcacactgtgaacgtgcccctgcagacgaccctggggaccttggaggagattgcctgctgacacccctcgagtcacccagcactccctccaaacagaccttgaggcccaagacccaggacaaggaacagcaagctcaggtgggatggccccagtgctggaaagaagcaagagccccctatgcacacattgcagactagctgcctagacctcgctccggccacgtccaacacgacgcatccttgggccccgccgtgcgtccctcttaggagagatgagtcacactctggaactgtccaagaacgaacctgccatcacatctcactgccagatgtataaagcacctgcatgctcagacttcttgtggcgccacctccacgtctgtcttgtacatgacactcctccacgcggtttccagtgtccacactgctgcccgtgcagtgggaccagattccaggtccaaagtcaccatgaggccaccctggaatcagaactgcacaatcaagagggaacccatgggactctctgctacattcagttcttgtgtcgtttgtgaaagttcttaacctgcccaaaaacccccttttccccaagctgcccatggggcttcggcgccaaaggtgacccgcgccaacctccctcccccccagtgcctatgacggcggcacagcagccagcgggtgggggacgcctgtgttcacccatggtgcccatgtcgttcttctctccctgtgacacagcttgtacagtctgattctttttatctggggtaggggggcttttatgtttgtccgatggagatttgttttgttttgcttcattttatgcttttttattttagttttgatgttctgaggtttgctttggtttttccattttctttggcatttatttattcgtgcttcaaatcacagtcatattaaaagctggtcttgtggaaa

SEQ ID NO: 8297 - protein, 563 aa, Homo sapiens; identical to SEQ ID NO: 1156

SEQ ID NO: 8298 - DNA, 607 bp, Homo sapiens
agacaatccacttctttgcatttctgtctatctccctgaaagaagacattggtgattccccaggtctcctacaactctgaaattttgattccaggcaatccatggggcagactttttatccttatttgacagatagagaagatgtcatggccctgtaagtcaagagaacaggatggccaaaggcaagaagaaaaagacactggaaggggcccctttctccttcagagagcctcgttcttacacaagggccaagaaacaggacatctaaggacttggaagccccaggcacgtgacccccggcctctctgttctccagctaaggaacgctttatggccttcgcatttattcatgtatttcctggacctactttgtactaggccaagggaagtgagctgaataagacccagcggggttgagagacataaaaatggcttattgaaattcaatactccaagggctggaagagatggatgagtagcgagccggaggagcacaaaggcaggagtcccgctgtctgcctagggaatgcttgaggaaataagaatagcccacatttattaagcacacagtacaagcaagcactctattaaatgccttacatgatgt

SEQ ID NO: 8299 - protein, 78 aa, Homo sapiens
MSWPCKSREQDGQRQEEKDTGRGPFLLQRASFLHKGQETGHLRTWKPQARDPRPLCSPAKERFMAFAFIHVFPGPTLY

SEQ ID NO: 8300 - DNA, 2103 bp, Homo sapiens
aaattgaaccccagagctcagctcccaagaaggttaacataatggttttgctactcatcgtaacaacacctcacatcatgccttcagatcactccccagcatcattcttcaaattcaaacgcgaaccagaagtgacaaatgattcttgtaatgcgctctttgacacaaatcatttctgattgctcgggaccccagacaaccttgagcatgcagaatcaagctgagagggagaagtcttagaaaatgaacagcttcaacttcttgccgatgagaaccctctctctgctcacgaggcaggagcagtatgtgctgattgccaaacagatcatttttaaaatgatgcagatctgtgggggattggtccgtgtggtgatgtgtctcatcttacaatgtcctatgcagccttcaaagcgtttttagatcctggcaaggaaacagacattcatgtgcgtagggtttgcaaggcctctgcatatgatgttgctcttcatcctcccagcaagcttgggtttgctctgagaaaagcaggattttgtagccctggccccaatctttggacttctgcaaaacgggagatcagaaaccccacaatgtcccccccgaacagagtgattgagtggctgataaatctgtggacatgtgaaaatgaagtgcagcttgctatattatagcatccaaactgcaggggagccaacaaacatctaactctgcccactcattttaccactggggcgaacgaggttcagggaggagcagggactcacctgagcccaggaatagggaggctcaacggaaactcaggccattgttgcaaagcacatcctatctgcagtaagattatatacgtgtagctggcacaggaccttgctagcacaggacctcactcccagctcctcctgcagctcaacatggccaggtgactggttctcactaaagcaaccttggaaaaaagcagaagaatcactgtctaggaccgatggatgtcattgctgcatcagtgtaggacgtgacatgctacctgtcctggagggccaccaccaggagagagcacgtcacactcttgtgcatcggagtggatgaaactgaagcctagaaagaagtgactgctcacaggataaaccgggaattaaatccacgcttcctcattcccaaccctggctccttctgattcttgcatttgaggcatctgtaaaaatgtatagctctacctcctcctgctccccatccccagcccaccactggagcatttttcactaaatgctgaagaacagtccttagaggtaaagtggacacttcatctgccttaccagtgcccatgcacgtcctcatcttccttaccaagagaacccagaactggttcagagatccaggcctcccacctcagactcataagaagagagcttctcttcctcctctggacgctgtcctgtgtgtagcactcaggactgctgaagacatctaggtaacagcttgaaggtgaaaccagcactgaggtttcctgattcctgggtggagcgcagactggagcctaagccctgacagcatgtttcatttcaacacatcaaattttcattgagcatctactgtgtgcctggcactgtggtcaatgccgtgataataagggacttgcagctcaagtatatctgtgcttcactggaagagttgaaagagctggagactgtctgtgatcaatgagcccctgtcactctcatgacactttcctgaaccatttcaccagcactcagaagatgaagactgtgctctacctgttccttctctgaagctagaagatctggtgtttcgactttgccccagccaactgaccacattgagtgatgtgcttagtttacactgaataccaagagatgggtgggattgctgtgcatatatattagcaggattttggctggaggccacttgtgacctctattgaatgtaacttcctcactcaggagttgatatggaaccactcactcctattggctcagtgcccagaaggcctcagagagagcccacaagatcaacccgacagaccccggctttccaaataaagaaacgcaccccccccaccccagggtaggggtctttgtgggtcctgcctac

SEQ ID NO: 8301 - protein, 93 aa, Homo sapiens
MSYAAFKAFLDPGKETDIHVRRVCKASAYDVALHPPSKLGFALRKAGFCSPGPNLWTSAKREIRNPTMSPPNRVIEWLINLWTCENEVQLAIL

SEQ ID NO: 8302 - DNA, 633 bp, Homo sapiens
agaaggccagctggcttcacgtcttattaacatcctgaactccagggttggtacccacagggtagtaagttgaccaccagaccactttatacagcatccaaactggcatggagaactcagactccattcagatggatatcaattccatctggatctaattaaatgcaaaggacccagcatcacaaatacaggtggcaggcagaagaggaggacagcaggtgaagtcagagagattcaaagcacaaggattcaactttctgttgctggccttgaagatgcaggaggccatgagccaaggaatgcaagcagcctctggaagttgaaaacgacctaagtgctcagtcctacagctgcatggaactgaaatctgccaacaccctgagtgatccggaagtggattttctcccaaagcctcctgataggagccccagccagctgacagattgacttcagcactatgacatcaaagagcccacccaaggctgttactggaaggagggccttgagtagacggggtttcaccatattggccaggatggtcctgaaatcttgacctcgtgatctgcccgcctcagcctcccaaagtgctgagattacagctcctggcaggtctttttggaaagtcaccatgac

SEQ ID NO: 8303 - protein, 31 aa, Homo sapiens
MTSKSPPKAVTGRRALSRRGFTILARMVLKS

SEQ ID NO: 8304 - DNA, 8192 bp, Homo sapiens
atggatgaggactttgaagaacatgcagaaacttttgagaaaacccctctgaggaaggcaaagtttgttgagagcccacgaattccagaatccgagcttggctcaccaaccctcacttcagctcagaaactggacgtggatgcatactgccctggtgatgctgaacaggagcttggcccccctccatctgtagatgaggcagcaaacacactcatgactcgtctgggtttcctccttggagagaaagtcacagaagttcagccaggtgaccaatacagcatggaagtacaggatgaaaatcagacctcagcaatcacccagcggataagtccttgttccactctgactagcagcactgcctctccaccagccagtagcccctgctctacactcccacccatcagtacaaatgcaactgccaaggactgcagctatggggctgttactagtccaacctctacccttgaaagcagagatagtggcatcattgctacattaacaagctattctgaaaatgtggaacgcacaaaatatgctggggaaagcagtaaagaattaggatctggaggaaacataaaaccttggcagtctcaaaaatccagcatggactcctgtttgtatcgagtagatgaaaacatgactgcttccacctatagtctgaataagatcccagagagaaatttggaaacagtgttatctcaatcagtacagtctattcctttgtatctcatgccacggccaaattcagtagcagccaccagctctgcccacttggaagaccttgcttacctggatgagcagagacatacacctttgagaacttctctacgaatgccaagacagagcatgggtggtgctcgcacacagcaggatttaagagttcgctttgcaccttataggcctccagatatctccttgaagcctctgctctttgaagtgcccagcatcactacagagtcagtgtttgttggccgagattgggttttccacgaaatagatgctcaacttcaaagttcaaatgccagcgtgaaccaaggagtagtgattgtgggaaacattggattcggcaaaactgccatcatctccagactggtggccctcagctgccatggtacaaggatgagacagatcgcctcagacagcccacatgcctcccccaaacatgtggatgccaacagagagctgccactcacacagccaccttcagcccactcatctatcaccagtggaagctgcccaggaactccggaaatgcgcaggcggcaggaggaggctatgcgaagactagcctcgcaggtggttgcctatcactattgtcaagcagataatgcctacacttgcttggtgccagaatttgtccacaatgttgctgccttgctctgccgctcacctcagctgacagcctatcgggagcagcttcttcgggaacctcacctgcagagcatgctgagccttcgttcctgtgttcaagaccccatggcctccttccggaggggagttctggagccactagaaaatctccataaagagagaaaaatcccagatgaagatttcatcattttaattgatggattaaatgaagcagaatttcacaaaccggattatggggatacaattgtatcgtttctgagtaaaatgatcggaaagtttccttcttggctcaaactaattgtaacagttaggaccagtttacaggaaattaccaagctgctgcctttccataggatttttttggatcgactagaagagaatgaagccatagaccaggacctgcaggcttacatcctgcaccggatacacagcagctcagagatccagaataacatttcacttaatggcaaaatggacaatactacatttggcaaactcagttctcatctcaagaccctcagtcaagggtcctatctatatctgaaacttacatttgacctcatagagaaaggctatctagtgttaaagagctctagctacaaagtagttcctgtttcgctctcagaggtttatttactccagtgcaatatgaagttcccaacccagtcttcctttgaccgggtgatgcctctcctgaatgtggcagtggcctctctccacccactgactgatgagcatatcttccaggccatcaatgctgggagcattgaaggcacactagaatgggaggattttcagcagagaatggagaacctctccatgttcctaatcaagcgcagagacatgactcgtatgtttgtacatccttcttttcgagaatggcttatctggagagaagaaggagagaaaaccaaatttctctgtgatccgaggagtggtcacacgttacttgccttctggttttcccgccaagagggaaaactaaaccgacagcagactattgaactgggacatcacatcctcaaagcacacatttttaagggtttgagtaaaaaagttggtgtatcatcctccatcctccaaggtctctggatctcttatagcacagaaggtctttccatggcactggcgtctttacgaaatctctacactccaaatataaaggtcagccgactgctgattttgggaggtgccaatattaattaccggacagaggttttaaataatgctccaattctatgtgttcagtcccatcttggttacacagaaatggtagccctgctgctggagttcggggccaacgtggatgcctcttctgaaagtggcctgactcccctgggatatgctgcagcagcagggtacctgagcattgtggtgctgctgtgcaagaaacgggccaaggtggatcatttggataagaacgggcagtgtgctttggttcatgctgcactccgaggtcatctggaggttgtcaagtttttgattcagtgtgactggacgatggccggccagcagcaaggagtatttaagaagagccatgccatccaacaggccctcattgctgcagccagcatgggttatactgagattgtctcctacctacttgatcttccagaaaaagatgaagaggaagtagagcgagcacagatcaacagctttgacagtctctggggagagacagccctaacagctgcagccggaaggggcaaactggaggtgtgccgtttgctcttggaacaaggggcggcagtggcccagccaaaccgccgaggagcagtgccactattcagcacagtgcgccagggccactggcagattgttgatcttttactcacccatggagctgatgtcaacatggcagacaagcagggccgcactcccctgatgatggctgcttccgaaggccatctaggaaccgtggactttctgcttgcacaaggtgcctccattgctcttatggacaaagaaggattgacagccctcagctgggcttgtttgaagggccatctctcagtagtacgttctctggtggataacggagctgccacagaccatgctgacaagaatggccgtaccccactggatctggcagctttctatggcgatgctgaggtggtccagttcctggtagatcatggggccatgatcgagcacgttgactacagtggaatgcgccctttggatagggcagtggggtgccggaacacttctgttgttgtcactcttctgaagaaaggagccaagataggttgtcagacgttaccgagtcgcccacgaggtccagccacatgggcgatggccacctccaagccagacatcatgatcatcctgttgagcaagctgatggaagagggggacatgttttataagaaaggtaaagtaaaggaagctgcccagcgctaccagtacgccctgaagaagttccctagagaagggtttggtgaggacttgaaaactttccgggaactaaaggtgtctctcctcctcaacctctctcggtgtcgcaggaaaatgaacgattttggaatggcggaggaatttgctactaaggccctggagctgaaaccgaaatcttatgaagcttactatgcgagagcaagggcaaaacgcagcagcagacagttcgcagcagccttagaggacctgaacgaggccatcaagctgtgtcccaacaaccgtgagatccagagacttctgctgagagtggaagaagagtgtagacagatgcagcagccacagcagccaccgccgccaccgcagcctcagcagcagttgccggaagaagcagaacctgagccacagcatgaagacatatactctgtacaggatatattcgaggaggagtacctggaacaggatgttgaaaatgtttccattggcctccagacagaggcccggcccagccaggggctcccggtcatccagagcccaccctcctctcccccgcatcgggactcagcctacatctccagctcacctcttggctctcatcaggtttttgacttccggtccagtagttctgtaggctctcccactagacagacctatcagtccacctcacctgccctttctccaactcatcagaactcacattacaggcctagcccaccacacacttccccggctcatcagggaggatcttaccgtttcagcccccctcctgtgggaggacagggcaaagaatacccaagccctcccccttcccctctccggagaggccctcagtatcgggccagccctccagctgaaagtatgagtgtctatagatcccagtctggttcacccgtgcgctatcagcaggaaacaagcgtcagtcagcttcctggcagacccaaatctccattatccaaaatggcccagcggccctaccagatgcctcagctccctgtggcagttccccagcaagggctcaggctacagcctgccaaggcccagattgtgagaagtaaccagcccagcccagccgtccattcaagcaccgtcatccccacaggagcctatggccaagtagcccattcaatggccagtaaataccagtcttcacaaggagacataggagtcagccagagccggttggtttatcaagggtcaattgggggaatcgtaggggatggaaggccggtgcagcatgtccaagccagcctgagtgcaggcgccatctgtcagcatggaggattgaccaaagaggatcttccacagcgaccttcctcagcataccgaggtggcgtgagatacagccagacaccacagatcggacgcagccagtcagcatcctattacccagtctgtcactcaaaactagatctggagcgctcctccagccaactaggttcccctgatgtgtcgcatttaatcagaagacctatcagtgtcaaccctaacgaaatcaaaccgcacccgccaactcccaggccgttgctgcattcccaaagtgtaggccttcgcttctctccatctagcaatagtatctcctccacctccaacctaactccgaccttccggccatcttcttccatccagcaaatggagatcccactgaaacctgcatatgagaggtcatgtgacgagctgtcgccagtgtctccaactcaaggaggttaccccagtgagcccacccgatccaggaccacaccattcatggggatcatagataaaacagcacggactcagcagtacccccacctccaccagcagaatcggacctgggcagtgtcatctgtggacaccgtcctcagtcccacgtctccaggcaacctgcctcagcctgagtccttcagtccaccatcatccatcagcaacattgccttttataacaaaaccaacaatgcacagaatggccatttgctggaggacgattattacagcccccatgggatgctggctaacgggtctcgtggagacctcttggagcgagtcagccaggcctcctcctatcccgacgtgaaggtagctcggactctacctgtggctcaggcataccaggacaacctgtacaggcagctgtcccgagactctcggcaagggcagacatcccctatcaaaccaaagagaccgttcgtggagtctaatgtttaaaagacgttttgttggagtgagacccatatgttttcactgcacattttcaggcttggtttccacattcgaggtagttctctggcttaatttctcatgtagtttctgtgtggtgttcagaggtggcagcccacatgctgaaatcctttgcatgcagccgactgggaagcggcctcccgggagccaggacttcagtttctcttgtctgtgcccagccacatgctctctccctctcttcagatgccaacgaggagattttcgtgctgtgtgctttaacccagggagatcagacacactggtcagctttttccaggagacaatcgctttcactgatgttcttgttgtgtaattgtctttttccttttttaaaaaataaggtgttcttgttcgttttcttctagaaactttagaaagagtgcgatgcccctttgcctttgcatccttagccagtgtcacccacacagccagccgcagcgcattctcatgctgtggcccctccccagaccgccagcgccctgcagccaccaggtctgcagtgtgcattaggattattgctggtcttcctagggggtaaaaggatcagagagagaagaattaagtgctaaattggaagaaaaccccaatataattatgtaaaatgtcactacattgattttccaagaggcattgtaggaacatgtcaaaaacagccagccctttaaatattgcagtcagccaaggaaattagatgagaattgtggctattaagagaattcactgagagttattctctagatttttagccgacaattaaccactaaaagctgctgcttttccagggtgggggagggaatgaatacatagaaaaacaaaaaagattgttctggattctcagtgaaaggctataggaagtctgttctggagacatctactttttagatcctgatacatcactgagtgtcatactccactaaaaggaaactctaaccgaaggctggctggtgtgacaatcccgttagttggatcttcacctacagccagattttgttctagtggccctcttcctgtaaacccagatggtgtcatacagaaattgtttctttcagaagcagattggaatctcttgggaccatgagactgagtcccaatatttccacccagggtcatgcccgttgttgtctacttccattttgagatctatagtttgattatctattattacaggaactgtttcttttctttttctaggagtgtttatgagagtgtgatattttaaagtcagacgcagcaaaaactgtttcagggtgaagaaagacccctttcagccctgttttgcagccctgggtgggggcatgagatagacagcaagcttctgatcttgaagcttgtctagaagacacatcttctaggtctcgtggtcatttggtaggctgacctttgagtgagcgaggccactattgagtggatagcaagaacattggaaccaaagcctcggcacaggcctggcactggctgtacatcagctcttacaactaaacaactcaactaagcaactgaaacgaaacaaaggagcattcgttctctgttgttaggaatcattctgctctgttagggaagggctgcaggaagggcagtttcctgaataaaaatctggctgcgaccagtcccatgtgtctggtaagtaagtaagtaagtaagtgccctttgaagggatcattaagacacagggagcatgaacctgagatcagaagcatttctttactaatttagattctgcgaaatagacggacctctccacccccaaacctaaaacaggccaggacttgtctctgtgctgaaagcaaatagcaagactaactcaagccccagcctctttccacactccctgatacctaaggactgctttctcagctagaccagggtgggcatcagcgacgccttctcagctagaccagggtaggcatcagcgtcctctctccatctctatacccctctctctcacatcaggaagatgaaatgtgtagctctagcggcaacctctagccaggagcccagtggcctctcagattgctttttggccaggtctcagcactgctggcatctttacatcttactccttaaaaccgcctctcgctgaggagccactgcattttgaagaatttctcagtgtctgtcaggaaagtgctcctgctcatttggaacgccacacaccacccgcactcacctgtccaggcgaatgagcaggtcctgtagctttacaaatatgccgc

SEQ ID NO: 8305 - protein, 1981 aa, Homo sapiens
MDEDFEEHAETFEKTPLRKAKFVESPRIPESELGSPTLTSAQKLDVDAYCPGDAEQELGPPPSVDEAANTLMTRLGFLLGEKVTEVQPGDQYSMEVQDENQTSAITQRISPCSTLTSSTASPPASSPCSTLPPISTNATAKDCSYGAVTSPTSTLESRDSGIIATLTSYSENVERTKYAGESSKELGSGGNIKPWQSQKSSMDSCLYRVDENMTASTYSLNKIPERNLETVLSQSVQSIPLYLMPRPNSVAATSSAHLEDLAYLDEQRHTPLRTSLRMPRQSMGGARTQQDLRVRFAPYRPPDISLKPLLFEVPSITTESVFVGRDWVFHEIDAQLQSSNASVNQGVVIVGNIGFGKTAIISRLVALSCHGTRMRQIASDSPHASPKHVDANRELPLTQPPSAHSSITSGSCPGTPEMRRRQEEAMRRLASQVVAYHYCQADNAYTCLVPEFVHNVAALLCRSPQLTAYREQLLREPHLQSMLSLRSCVQDPMASFRRGVLEPLENLHKERKIPDEDFIILIDGLNEAEFHKPDYGDTIVSFLSKMIGKFPSWLKLIVTVRTSLQEITKLLPFHRIFLDRLEENEAIDQDLQAYILHRIHSSSEIQNNISLNGKMDNTTFGKLSSHLKTLSQGSYLYLKLTFDLIEKGYLVLKSSSYKVVPVSLSEVYLLQCNMKFPTQSSFDRVMPLLNVAVASLHPLTDEHIFQAINAGSIEGTLEWEDFQQRMENLSMFLIKRRDMTRMFVHPSFREWLIWREEGEKTKFLCDPRSGHTLLAFWFSRQEGKLNRQQTIELGHHILKAHIFKGLSKKVGVSSSILQGLWISYSTEGLSMALASLRNLYTPNIKVSRLLILGGANINYRTEVLNNAPILCVQSHLGYTEMVALLLEFGANVDASSESGLTPLGYAAAAGYLSIVVLLCKKRAKVDHLDKNGQCALVHAALRGHLEVVKFLIQCDWTMAGQQQGVFKKSHAIQQALIAAASMGYTEIVSYLLDLPEKDEEEVERAQINSFDSLWGETALTAAAGRGKLEVCRLLLEQGAAVAQPNRRGAVPLFSTVRQGHWQIVDLLLTHGADVNMADKQGRTPLMMAASEGHLGTVDFLLAQGASIALMDKEGLTALSWACLKGHLSVVRSLVDNGAATDHADKNGRTPLDLAAFYGDAEVVQFLVDHGAMIEHVDYSGMRPLDRAVGCRNTSVVVTLLKKGAKIGCQTLPSRPRGPATWAMATSKPDIMIILLSKLMEEGDMFYKKGKVKEAAQRYQYALKKFPREGFGEDLKTFRELKVSLLLNLSRCRRKMNDFGMAEEFATKALELKPKSYEAYYARARAKRSSRQFAAALEDLNEAIKLCPNNREIQRLLLRVEEECRQMQQPQQPPPPPQPQQQLPEEAEPEPQHEDIYSVQDIFEEEYLEQDVENVSIGLQTEARPSQGLPVIQSPPSSPPHRDSAYISSSPLGSHQVFDFRSSSSVGSPTRQTYQSTSPALSPTHQNSHYRPSPPHTSPAHQGGSYRFSPPPVGGQGKEYPSPPPSPLRRGPQYRASPPAESMSVYRSQSGSPVRYQQETSVSQLPGRPKSPLSKMAQRPYQMPQLPVAVPQQGLRLQPAKAQIVRSNQPSPAVHSSTVIPTGAYGQVAHSMASKYQSSQGDIGVSQSRLVYQGSIGGIVGDGRPVQHVQASLSAGAICQHGGLTKEDLPQRPSSAYRGGVRYSQTPQIGRSQSASYYPVCHSKLDLERSSSQLGSPDVSHLIRRPISVNPNEIKPHPPTPRPLLHSQSVGLRFSPSSNSISSTSNLTPTFRPSSSIQQMEIPLKPAYERSCDELSPVSPTQGGYPSEPTRSRTTPFMGIIDKTARTQQYPHLHQQNRTWAVSSVDTVLSPTSPGNLPQPESFSPPSSISNIAFYNKTNNAQNGHLLEDDYYSPHGMLANGSRGDLLERVSQASSYPDVKVARTLPVAQAYQDNLYRQLSRDSRQGQTSPIKPKRPFVESNV

SEQ ID NO: 8306 - DNA, 307 bp, Homo sapiens
agtgtttttcccattgcccttaatgttctccagaaggatcctaagaaagctcccaatctggatctcttaaaggtcctacaaatacacaacataagaagctaaagaggaaattcataaggtccatttgaataccttggaaactactgaaagaataaaggggtcaggaggaaacccagacgagtcatgagtgtgtttgctgcctcatctacagatggaggggggccaagctcctgttcagcatcacctgtaacaagaaggcattgaagaacatgaatctttcaaaataaaatggtctagttctgcaact

SEQ ID NO: 8307 - protein, 30 aa, Homo sapiens
EAKEEIHKVHLNTLETTERIKGSGGNPDES

SEQ ID NO: 8308 - DNA, 494 bp, Homo sapiens
cggcaactgaaatctgtcctaggggcactcatagacatatgaactccagctcttcaggcctctcttcgagaacaccacctctaactcatcaggcatctgccagtcatctactaaagagctctgctttgaaaagactcctcatctactgagctaagaaatacaagtacgtataaaggcataccttggagatactgtgggttttgttccaggtcaccaaaataaaacaaacagagcaataaggaagctactggaagatatgctccaccaaaatgaagaataaaatcgagaaagaatatgacatgagatgaaacacaaaagaggagggacaggaactcccaggagaacaaggtggaggaaacccagacgagtcatgagtgtgtttgctgcctcatctacagatggaggggggccaagctcctgttcagcatcacctgtaacaagaaggcattgaagaacatgaatctttcaaaataaaatggtctagttctgcaact

SEQ ID NO: 8309 - protein, 48 aa, Homo sapiens
MKHKRGGTGTPRRTRWRKPRRVMSVFAASSTDGGGPSSCSASPVTRRH

SEQ ID NO: 8310 - DNA, 412 bp, Homo sapiens
tcccaagtaactggaactacaggcacacgccagcacaactggctaactttttaacttttttgtagagacaggatcctgctttgttacccaggctagtcttggactcctggactcgagcgaccctcccaccttggcctcccaaagtgctgggattacaggtgtgagccatcatgcctgggtattttgaaaaccttaagatacacaggtataagatgttattatttactcatccattctgcaaataaaataacctatcacctaaactgagttttcatgggataaataagagttcagggccgggtgcggtggctcacacctgtaatcccagcactttgggaggccaaggcgggtggatcatgaagtcaggagattgagaccatccaggctaacacagtgaaaccccatctctact

SEQ ID NO: 8311 - protein, 56 aa, Homo sapiens [sequence omitted]

SEQ ID NO: 8312 - DNA, 609 bp, Homo sapiens
actcattcaaaggtcttggggaagtgtcagtgatgactgctgccaaaaactgggttggatttgtatgaagcttcgggacagggtaatccagctgatccagtgcgatgactttgacatgtaatagaccaaggaattcatttgtgtcagggtatggagccttcagcttggactgccagatgtagaagatccaatggagaattctgaggcccaaggtgattttagaactactacacggaaggagcctgcccagacatctgcactgtactgtgatctggtgcagattgagaattctagcagtttgggagaagttaaagcctctcaacagggaacactgcatttaaaggatcctgtaaactgcagcaccaggaaaaccatagtccaagtcttcattcttcagcttgcagtcacgtcaccaccatatgctgtacactagagtatttatggcttgaatcacacatggagccagtcttatctcaggcaaccatgctgtctgcatcagtataagataaaactgtgctaatgacaggagggcatgtttaaatgtacgtttccatgtatgggataaaatacttcgtcaaatgaagcttggtcaaatgaagcttcatgcta

SEQ ID NO: 8313 - protein, 80 aa, Homo sapiens
MENSEAQGDFRTTTRKEPAQTSALYCDLVQIENSSSLGEVKASQQGTLHLKDPVNCSTRKTIVQVFILQLAVTSPPYAVH

SEQ ID NO: 8314 - DNA, 652 bp, Homo sapiens
ggtggatcatttggataagaacgggcagtgtgctttggttcatgctgcactccgaggtcatctggaggttgtcaagtttttgattcagtgtgactggacgatggccggccagcagcaaggagtatttaagaagagccatgccatccaacaggccctcattgctgcagccagcatgggttatactgagattgtctcctacctacttgatcttccagaaaaagatgaagaggaagtagagcgagcacagatcaacagctttgacagtctctggggagagacaggtacctctcatggacgttgccctcaagaatgtgttgtgtttgtgtggactctcgaatctcacccccttattttttccctggcatacatttggcagtcttctgtctcaggcttttgtaatgcagactgattcagccaaactaaacagtcaagcagttttcctctttcaatcctctttgcctgtggattctccatactctttgcaccagagtcttctttcaaacaaaactttttccctctcttgtttccaaatatttttaaaagactgaaagttaccttacaatgtgccaaaccagagcagaaaattattgtggcctgtctcctttttatgtgatccttgtagtagttaggaataaatatttctcccatcaaa

SEQ ID NO: 8315 - protein, 102 aa, Homo sapiens; identical to SEQ ID NO: 1160

SEQ ID NO: 8316 - DNA, 2592 bp, Homo sapiens
gtgctgaggaggaaggaaaccaggcagggctgaggggctcacagtcgccacgtgggcacgtgggtgtgggcctggccgacctcggctgctggggtgtccggccgccctgtcccggaaccgtctcctttcaaatcctagtggctggtgggcttcagcttcttcctgttccccggagcttcattctccctgcggagccgctaccgcccacagcacatcttctttggtgctaccatcttcctcctttccgtgggcaccgccctgctgggcctgaaggaggcactgctgttcaacctcgggggcaagtatagcgcatttgagcccgagggtgtcctggccaacgtgctgggcctgctgctggcctgcttcggtggggcggtgctctacatcttgacccgggccgactggaagcggccttcccaggcggaagagcaggccctctccatggacttcaagacgctgacggagggagatagccccggctcccagtgatgcgcccggccggccctgggggttcgcggggtgtcttcttgcctgcccctgctgaggcgtcttcaggactgcaggctccggagagtggctctggcagcaggcgggcgcgtgggtgcagctgcatctgtttgagtgctgctttctggggtcaggtctccgcctcctctgcttctcctttctccgctgctatagaccagttcattgtgtgtggctcccgtgtctctgttgcccccttcagtgcagaaggctttgggtaggacttcgggtgttcggtcctggtcgcagagcacagatctttaaagaagcgagagaggaggccccaccctcctggcagcagatgcctggggcaaggccaggggaaactgggggggcctcagggacaggcctggaaaggccacgatggctgctgaattcaaacaaggagtccctccagcctgaataacacgtggcacaaatgggcccggcctttggcagaggagcaagtgatatgatgtgtaaagtatgttggtggtgaaagcaaggttccccaggagaggggagggactggcccctgggaagctctgagatgaggctgtggcccagctgtagtcctgaccttcctcttctttaaccctttagccctaggatggctttggtgggagaggggatagaagcccatgacttcagacagactttctcttggcagatgcaggcgggcctcctcccaggctgctccagacatgggggttggggatggggggcaccttgcagccccttcctgctggggctccctccttgtagcaccccccttgcggctcagctctggtttcctctcccaggctcacccaggctctgctcaggctgggaggcagagggcacaaaccttataattttttaaatgaaaaaccgctgctgctggctgtggctagagccccctggggctgctggagctgctgcctctgttctggaggacgagccttctccttatctgctgcccatctttccaggaagtcaggatggagtcagaacaactacagtcatcccccgtggtgtctgcacatcactccagccccataaagagtgtcatgttagctgagtcaccatttggcttcggcctggaaatagtgtgattagaacactgatcgtgtgcgaggccaggagatcaagaccatcctgactaacaaacacagtgaaaccccgtctctactaaaaatacaaaaaaattagccaggcgtggtggtgggcgcctgtagtcccagctacttgggaggctgaggcaggagaatggtgtgaacccgggagatggcgcttgcagtgagctgagattgcactccagcctgggcgacaggctcaaaaaagaaaaaaaaaagaacaccgatcatgtgcttcttggatctggtgactgttctctccctgttttcctttctttttgggtgtttgaggagcatggcttagcttgagacacacacagacactgtgtacttcagtgaagggcttaatatacagtttccaaacctgacgactcttcttcttgtaatggctgcccttttcctacctgaggccgtcttagagaaaggggccagtctcctctaatgctcagatttcccatagttggcttttgctgtgtctcctgcctcaggcagtgtcatttctgggagcaggtggttgtagtccaggcccctccccagcagggtctgcccaggctccttcgagcccctttccccgcctcctctcagcctgtccggatgacagtgttcgcctcctgtttagactgtacactcttcaggggtaggggtgccgtcagttcttcaatcagctggcacacacttgtatagtgaaatgtttacatgtgggaaaactccgccttagacaaactaccaaagtacaatcgtgtctctctctagccggaatgctacagagagaaatggaaccttagatttgcaacaaaagtctgtaaactggtctgtttgccaaagtgaacactggatgactaaggagctgaagaaggcccccagaagcggatttgtggtgggttattttattttgcctgtggccaatcttctgtgaaatacaatgtgctgttggtgcaacagatgattcaataaatgtctacagcagacctct

SEQ ID NO: 8317 - protein, 85 aa, Homo sapiens [sequence omitted]

SEQ ID NO: 8318 - DNA, 3206 bp, Homo sapiens
aggtgagccctgactgcgcagggagggacagcgcggggctcccgagtagcagccggcctcgcacctgccccttgcggccgcgcactggactgcggcgccgacccgcaccctgggcccgagggctgcagggctcgcccgccctctcggagccgagcctctcccggtccaggcggcccctgccctggcctgcccgggtgccgggtctctgctgaagttagaaccgagacccccgcttgctggtgaccccgagtttggatctttgctcctgcgccgcgttctagagcaagcgtttgcctcagcatggagggcggggccgcggcagccacccccacagcactgccttactacgtggccttctcccagctgctgggcctgaccttggtggccatgaccggcgcgtggctcgggctgtaccgaggcggcattgcctgggagagcgacctgcagttcaacgcgcaccccctctgcatggtcataggcctgatcttcctgcagggaaatgccctgctggtttaccgtgtcttcaggaacgaagctaaacgcaccaccaaggtcctgcacgggctgctgcacatctttgcgctcgtcatcgccctggttggtgagttcccgggcgcggccttccccgccacctgcctgcctcttcaggcttggtggcggtgttcgactaccacaggaagaagggctacgctgacctgtacagcctacacagctggtgcgggatccttgtctttgtcctgtactttgtgcagtggctggtgggcttcagcttcttcctgttccccggagcttcattctccctgcggagccgctaccgcccacagcacatcttctttggtgctaccatcttcctcctttccgtgggcaccgccctgctgggcctgaaggaggcactgctgttcaacctcgggggcaagtatagcgcatttgagcccgagggtgtcctggccaacgtgctgggcctgctgctggcctgcttcggtggggcggtgctctacatcttgacccgggccgactggaagcggccttcccaggcggaagagcaggccctctccatggacttcaagacgctgacggagggagatagccccggctcccagtgatgcgcccggccggccctgggggttcgcggggtgtcttcttgcctgcccctgctgaggcgtcttcaggactgcaggctccggagagtggctctggcagcaggcgggcgcgtgggtgcagctgcatctgtttgagtgctgctttctggggtcaggtctccgcctcctctgcttctcctttctccgctgctatagaccagttcattgtgtgtggctcccgtgtctctgttgcccccttcagtgcagaaggctttgggtaggacttcgggtgttcggtcctggtcgcagagcacagatctttaaagaagcgagagaggaggccccaccctcctggcagcagatgcctggggcaaggccaggggaaactgggggggcctcagggacaggcctggaaaggccacgatggctgctgaattcaaacaaggagtccctccagcctgaataacacgtggcacaaatgggcccggcctttggcagaggagcaagtgatatgatgtgtaaagtatgttggtggtgaaagcaaggttccccaggagaggggagggactggcccctgggaagctctgagatgaggctgtggcccagctgtagtcctgaccttcctcttctttaaccctttagccctaggatggctttggtgggagaggggatagaagcccatgacttcagacagactttctcttggcagatgcaggcgggcctcctcccaggctgctccagacatgggggttggggatggggggcaccttgcagccccttcctgctggggctccctccttgtagcaccccccttgcggctcagctctggtttcctctcccaggctcacccaggctctgctcaggctgggaggcagagggcacaaaccttataattttttaaatgaaaaaccgctgctgctggctgtggctagagccccctggggctgctggagctgctgcctctgttctggaggacgagccttctccttatctgctgcccatctttccaggaagtcaggatggagtcagaacaactacagtcatcccccgtggtgtctgcacatcactccagccccataaagagtgtcatgttagctgagtcaccatttggcttcggcctggaaatagtgtgattagaacactgatcgtgtgcgaggccaggagatcaagaccatcctgactaacaaacacagtgaaaccccgtctctactaaaaatacaaaaaaattagccaggcgtggtggtgggcgcctgtagtcccagctacttgggaggctgaggcaggagaatggtgtgaacccgggagatggcgcttgcagtgagctgagattgcactccagcctgggcgacaggctcaaaaaagaaaaaaaaaagaacaccgatcatgtgcttcttggatctggtgactgttctctccctgttttcctttctttttgggtgtttgaggagcatggcttagcttgagacacacacagacactgtgtacttcagtgaagggcttaatatacagtttccaaacctgacgactcttcttcttgtaatggctgcccttttcctacctgaggccgtcttagagaaaggggccagtctcctctaatgctcagatttcccatagttggcttttgctgtgtctcctgcctcaggcagtgtcatttctgggagcaggtggttgtagtccaggcccctccccagcagggtctgcccaggctccttcgagcccctttccccgcctcctctcagcctgtccggatgacagtgttcgcctcctgtttagactgtacactcttcaggggtaggggtgccgtcagttcttcaatcagctggcacacacttgtatagtgaaatgtttacatgtgggaaaactccgccttagacaaactaccaaagtacaatcgtgtctctctctagccggaatgctacagagagaaatggaaccttagatttgcaacaaaagtctgtaaactggtctgtttgccaaagtgaacactggatgactaaggagctgaagaaggcccccagaagcggatttgtggtgggttattttattttgcctgtggccaatcttctgtgaaatacaatgtgctgttggtgcaacagatgattcaataaatgtctacagcagacctct

SEQ ID NO: 8319 - protein, 194 aa, Homo sapiens
MEGGAAAATPTALPYYVAFSQLLGLTLVAMTGAWLGLYRGGIAWESDLQFNAHPLCMVIGLIFLQGNALLVYRVFRNEAKRTTKVLHGLLHIFALVIALVGEFPGAAFPATCLPLQAWWRCSTTTGRRATLTCTAYTAGAGSLSLSCTLCSGWWASASSCSPELHSPCGAATAHSTSSLVLPSSSFPWAPPCWA

SEQ ID NO: 8320 - DNA, 1748 bp, Homo sapiens
gccaagcgacccgggcgcggcgcggggaggctgaagggacgctcgggtaggcaagcgtttgcctcagcatggagggcggggccgcggcagccacccccacagcactgccttactacgtggccttctcccagctgctgggcctgaccttggtggccatgaccggcgcgtggctcgggctgtaccgaggcggcattgcctgggagagcgacctgcagttcaacgcgcaccccctctgcatggtcataggcctgatcttcctgcagggaaatgccctgctggtttaccgtgtcttcaggaacgaagctaaacgcaccaccaaggtcctgcacgggctgctgcacatctttgcgctcgtcatcgccctggttggcttggtggcggtgttcgactaccacaggaagaagggctacgctgacctgtacagcctacacagctggtgcgggatccttgtctttgtcctgtactttgtgcagtggctggtgggcttcagcttcttcctgttccccggagcttcattctccctgcggagccgctaccgcccacagcacatcttctttggtgctaccatcttcctcctttccgtgggcaccgccctgctgggcctgaaggaggcactgctgttcaacctcgggaagtcaggatggagtcagaacaactacagtcatcccccgtggtgtctgcacatcactccagccccataaagagtgtcatgttagctgagtcaccatttggcttcggcctggaaatagtgtgattagaacactgatcgtgtgcgaggccaggagatcaagaccatcctgactaacaaacacagtgaaaccccgtctctactaaaaatacaaaaaaattagccaggcgtggtggtgggcgcctgtagtcccagctacttgggaggctgaggcaggagaatggtgtgaacccgggagatggcgcttgcagtgagctgagattgcactccagcctgggcgacaggctcaaaaaagaaaaaaaaaagaacaccgatcatgtgcttcttggatctggtgactgttctctccctgttttcctttctttttgggtgtttgaggagcatggcttagcttgagacacacacagacactgtgtacttcagtgaagggcttaatatacagtttccaaacctgacgactcttcttcttgtaatggctgcccttttcctacctgaggccgtcttagagaaaggggccagtctcctctaatgctcagatttcccatagttggcttttgctgtgtctcctgcctcaggcagtgtcatttctgggagcaggtggttgtagtccaggcccctccccagcagggtctgcccaggctccttcgagcccctttccccgcctcctctcagcctgtccggatgacagtgttcgcctcctgtttagactgtacactcttcaggggtaggggtgccgtcagttcttcaatcagctggcacacacttgtatagtgaaatgtttacatgtgggaaaactccgccttagacaaactaccaaagtacaatcgtgtctctctctagccggaatgctacagagagaaatggaaccttagatttgcaacaaaagtctgtaaactggtctgtttgccaaagtgaacactggatgactaaggagctgaagaaggcccccagaagcggatttgtggtgggttattttattttgcctgtggccaatcttctgtgaaatacaatgtgctgttggtgcaacagatgattcaataaatgtctacagcagacctct

SEQ ID NO: 8321 - protein, 210 aa, Homo sapiens
MEGGAAAATPTALPYYVAFSQLLGLTLVAMTGAWLGLYRGGIAWESDLQFNAHPLCMVIGLIFLQGNALLVYRVFRNEAKRTTKVLHGLLHIFALVIALVGLVAVFDYHRKKGYADLYSLHSWCGILVFVLYFVQWLVGFSFFLFPGASFSLRSRYRPQHIFFGATIFLLSVGTALLGLKEALLFNLGKSGWSQNNYSHPPWCLHITPAP

SEQ ID NO: 8322 - DNA, 2808 bp, Homo sapiens
ggcgacgccgtcgcgccacggcccgcagaaccggccaagcgacccgggcgcggcgcggggaggctgaagggacgctcgggtaggcaagcgtttgcctcagcatggagggcggggccgcggcagccacccccacagcactgccttactacgtggccttctcccagctgctgggcctgaccttggtggccatgaccggcgcgtggctcgggctgtaccgaggcggcattgcctgggagagcgacctgcagttcaacgcgcaccccctctgcatggtcataggcctgatcttcctgcagggaaatgccctgctggtttaccgtgtcttcaggaacgaagctaaacgcaccaccaaggtcctgcacgggctgctgcacatctttgcgctcgtcatcgccctggttggcttggtggcggtgttcgactaccacaggaagaagggctacgctgacctgtacagcctacacagctggtgcgggatccttgtctttgtcctgtactttgtgcagtggctggtgggcttcagcttcttcctgttccccggagcttcattctccctgcggagccgctaccgcccacagcacatcttctttggtgctctacatcttgacccgggccgactggaagcggccttcccaggcggaagagcaggccctctccatggacttcaagacgctgacggagggagatagccccggctcccagtgatgcgcccggccggccctgggggttcgcggggtgtcttcttgcctgcccctgctgaggcgtcttcaggactgcaggctccggagagtggctctggcagcaggcgggcgcgtgggtgcagctgcatctgtttgagtgctgctttctggggtcaggtctccgcctcctctgcttctcctttctccgctgctatagaccagttcattgtgtgtggctcccgtgtctctgttgcccccttcagtgcagaaggctttgggtaggacttcgggtgttcggtcctggtcgcagagcacagatctttaaagaagcgagagaggaggccccaccctcctggcagcagatgcctggggcaaggccaggggaaactgggggggcctcagggacaggcctggaaaggccacgatggctgctgaattcaaacaaggagtccctccagcctgaataacacgtggcacaaatgggcccggcctttggcagaggagcaagtgatatgatgtgtaaagtatgttggtggtgaaagcaaggttccccaggagaggggagggactggcccctgggaagctctgagatgaggctgtggcccagctgtagtcctgaccttcctcttctttaaccctttagccctaggatggctttggtgggagaggggatagaagcccatgacttcagacagactttctcttggcagatgcaggcgggcctcctcccaggctgctccagacatgggggttggggatggggggcaccttgcagccccttcctgctggggctccctccttgtagcaccccccttgcggctcagctctggtttcctctcccaggctcacccaggctctgctcaggctgggaggcagagggcacaaaccttataattttttaaatgaaaaaccgctgctgctggctgtggctagagccccctggggctgctggagctgctgcctctgttctggaggacgagccttctccttatctgctgcccatctttccaggaagtcaggatggagtcagaacaactacagtcatcccccgtggtgtctgcacatcactccagccccataaagagtgtcatgttagctgagtcaccatttggcttcggcctggaaatagtgtgattagaacactgatcgtgtgcgaggccaggagatcaagaccatcctgactaacaaacacagtgaaaccccgtctctactaaaaatacaaaaaaattagccaggcgtggtggtgggcgcctgtagtcccagctacttgggaggctgaggcaggagaatggtgtgaacccgggagatggcgcttgcagtgagctgagattgcactccagcctgggcgacaggctcaaaaaagaaaaaaaaaagaacaccgatcatgtgcttcttggatctggtgactgttctctccctgttttcctttctttttgggtgtttgaggagcatggcttagcttgagacacacacagacactgtgtacttcagtgaagggcttaatatacagtttccaaacctgacgactcttcttcttgtaatggctgcccttttcctacctgaggccgtcttagagaaaggggccagtctcctctaatgctcagatttcccatagttggcttttgctgtgtctcctgcctcaggcagtgtcatttctgggagcaggtggttgtagtccaggcccctccccagcagggtctgcccaggctccttcgagcccctttccccgcctcctctcagcctgtccggatgacagtgttcgcctcctgtttagactgtacactcttcaggggtaggggtgccgtcagttcttcaatcagctggcacacacttgtatagtgaaatgtttacatgtgggaaaactccgccttagacaaactaccaaagtacaatcgtgtctctctctagccggaatgctacagagagaaatggaaccttagatttgcaacaaaagtctgtaaactggtctgtttgccaaagtgaacactggatgactaaggagctgaagaaggcccccagaagcggatttgtggtgggttattttattttgcctgtggccaatcttctgtgaaatacaatgtgctgttggtgcaacagatgattcaataaatgtctacagcagacctct

SEQ ID NO: 8323 - protein, 195 aa, Homo sapiens [sequence omitted]

SEQ ID NO: 8324 - DNA, 2989 bp, Homo sapiens
caccgcccagcccgccgcccggttgccatggcgacgccgtcgcgccacggcccgcagaaccggccaagcgacccgggcgcggcgcggggaggctgaagggacgctcgggtaggcaagcgtttgcctcagcatggagggcggggccgcggcagccacccccacagcactgccttactacgtggccttctcccagctgctgggcctgaccttggtggccatgaccggcgcgtggctcgggctgtaccgaggcggcattgcctgggagagcgacctgcagttcaacgcgcaccccctctgcatggtcataggcctgatcttcctgcagggaaatgccctgctggtttaccgtgtcttcaggaacgaagctaaacgcaccaccaaggtcctgcacgggctgctgcacatctttgcgctcgtcatcgccctggttggcttggtggcggtgttcgactaccacaggaagaagggctacgctgacctgtacagcctacacagctggtgcgggatccttgtctttgtcctgtactttgtgcagtggctggtgggcttcagcttcttcctgttccccggagcttcattctccctgcggagccgctaccgcccacagcacatcttctttggtgctaccatcttcctcctttccgtgggcaccgccctgctgggcctgaaggaggcactgctgttcaacctcgggggcaagtatagcgcatttgagcccgagggtgtcctggccaacgtgctgggcctgctgctggcctgcttcggtggggcggtgctctacatcttgacccgggccgactggaagcggccttcccaggcggaagagcaggccctctccatggacttcaagacgctgacggagggagatagccccggctcccagtgatgcgcccggccggccctgggggttcgcggggtgtcttcttgcctgcccctgctgaggcgtcttcaggactgcaggctccggagagtggctctggcagcaggcgggcgcgtgggtgcagctgcatctgtttgagtgctgctttctggggtcaggtctccgcctcctctgcttctcctttctccgctgctatagaccagttcattgtgtgtggctcccgtgtctctgttgcccccttcagtgcagaaggctttgggtaggacttcgggtgttcggtcctggtcgcagagcacagatctttaaagaagcgagagaggaggccccaccctcctggcagcagatgcctggggcaaggccaggggaaactgggggggcctcagggacaggcctggaaaggccacgatggctgctgaattcaaacaaggagtccctccagcctgaataacacgtggcacaaatgggcccggcctttggcagaggagcaagtgatatgatgtgtaaagtatgttggtggtgaaagcaaggttccccaggagaggggagggactggcccctgggaagctctgagatgaggctgtggcccagctgtagtcctgaccttcctcttctttaaccctttagccctaggatggctttggtgggagaggggatagaagcccatgacttcagacagactttctcttggcagatgcaggcgggcctcctcccaggctgctccagacatgggggttggggatggggggcaccttgcagccccttcctgctggggctccctccttgtagcaccccccttgcggctcagctctggtttcctctcccaggctcacccaggctctgctcaggctgggaggcagagggcacaaaccttataattttttaaatgaaaaaccgctgctgctggctgtggctagagccccctggggctgctggagctgctgcctctgttctggaggacgagccttctccttatctgctgcccatctttccaggaagtcaggatggagtcagaacaactacagtcatcccccgtggtgtctgcacatcactccagccccataaagagtgtcatgttagctgagtcaccatttggcttcggcctggaaatagtgtgattagaacactgatcgtgtgcgaggccaggagatcaagaccatcctgactaacaaacacagtgaaaccccgtctctactaaaaatacaaaaaaattagccaggcgtggtggtgggcgcctgtagtcccagctacttgggaggctgaggcaggagaatggtgtgaacccgggagatggcgcttgcagtgagctgagattgcactccagcctgggcgacaggctcaaaaaagaaaaaaaaaagaacaccgatcatgtgcttcttggatctggtgactgttctctccctgttttcctttctttttgggtgtttgaggagcatggcttagcttgagacacacacagacactgtgtacttcagtgaagggcttaatatacagtttccaaacctgacgactcttcttcttgtaatggctgcccttttcctacctgaggccgtcttagagaaaggggccagtctcctctaatgctcagatttcccatagttggcttttgctgtgtctcctgcctcaggcagtgtcatttctgggagcaggtggttgtagtccaggcccctccccagcagggtctgcccaggctccttcgagcccctttccccgcctcctctcagcctgtccggatgacagtgttcgcctcctgtttagactgtacactcttcaggggtaggggtgccgtcagttcttcaatcagctggcacacacttgtatagtgaaatgtttacatgtgggaaaactccgccttagacaaactaccaaagtacaatcgtgtctctctctagccggaatgctacagagagaaatggaaccttagatttgcaacaaaagtctgtaaactggtctgtttgccaaagtgaacactggatgactaaggagctgaagaaggcccccagaagcggatttgtggtgggttattttattttgcctgtggccaatcttctgtgaaatacaatgtgctgttggtgcaacagatgattcaataaatgtctacagcagacctct

SEQ ID NO: 8325 - protein, 251 aa, Homo sapiens; identical to SEQ ID NO: 1162

SEQ ID NO: 8326 - DNA, 2831 bp, Homo sapiens
ttgggagccaggcgcctgcttgctaggagtaggaccatctgcccaggcttaggtgggggcctgtgtgaggagccacgtggctaacaggtgaactcagaggctgcttgttgcctcagtgtgaccaacagtggacctcaaacacagcctggaatttgcaggacacctgacaagaagccctgctggtttaccgtgtcttcaggaacgaagctaaacgcaccaccaaggtcctgcacgggctgctgcacatctttgcgctcgtcatcgccctggttggcttggtggcggtgttcgactaccacaggaagaagggctacgctgacctgtacagcctacacagctggtgcgggatccttgtctttgtcctgtactttgtgcagtggctggtgggcttcagcttcttcctgttccccggagcttcattctccctgcggagccgctaccgcccacagcacatcttctttggtgctaccatcttcctcctttccgtgggcaccgccctgctgggcctgaaggaggcactgctgttcaacctcgggggcaagtatagcgcatttgagcccgagggtgtcctggccaacgtgctgggcctgctgctggcctgcttcggtggggcggtgctctacatcttgacccgggccgactggaagcggccttcccaggcggaagagcaggccctctccatggacttcaagacgctgacggagggagatagccccggctcccagtgatgcgcccggccggccctgggggttcgcggggtgtcttcttgcctgcccctgctgaggcgtcttcaggactgcaggctccggagagtggctctggcagcaggcgggcgcgtgggtgcagctgcatctgtttgagtgctgctttctggggtcaggtctccgcctcctctgcttctcctttctccgctgctatagaccagttcattgtgtgtggctcccgtgtctctgttgcccccttcagtgcagaaggctttgggtaggacttcgggtgttcggtcctggtcgcagagcacagatctttaaagaagcgagagaggaggccccaccctcctggcagcagatgcctggggcaaggccaggggaaactgggggggcctcagggacaggcctggaaaggccacgatggctgctgaattcaaacaaggagtccctccagcctgaataacacgtggcacaaatgggcccggcctttggcagaggagcaagtgatatgatgtgtaaagtatgttggtggtgaaagcaaggttccccaggagaggggagggactggcccctgggaagctctgagatgaggctgtggcccagctgtagtcctgaccttcctcttctttaaccctttagccctaggatggctttggtgggagaggggatagaagcccatgacttcagacagactttctcttggcagatgcaggcgggcctcctcccaggctgctccagacatgggggttggggatggggggcaccttgcagccccttcctgctggggctccctccttgtagcaccccccttgcggctcagctctggtttcctctcccaggctcacccaggctctgctcaggctgggaggcagagggcacaaaccttataattttttaaatgaaaaaccgctgctgctggctgtggctagagccccctggggctgctggagctgctgcctctgttctggaggacgagccttctccttatctgctgcccatctttccaggaagtcaggatggagtcagaacaactacagtcatcccccgtggtgtctgcacatcactccagccccataaagagtgtcatgttagctgagtcaccatttggcttcggcctggaaatagtgtgattagaacactgatcgtgtgcgaggccaggagatcaagaccatcctgactaacaaacacagtgaaaccccgtctctactaaaaatacaaaaaaattagccaggcgtggtggtgggcgcctgtagtcccagctacttgggaggctgaggcaggagaatggtgtgaacccgggagatggcgcttgcagtgagctgagattgcactccagcctgggcgacaggctcaaaaaagaaaaaaaaaagaacaccgatcatgtgcttcttggatctggtgactgttctctccctgttttcctttctttttgggtgtttgaggagcatggcttagcttgagacacacacagacactgtgtacttcagtgaagggcttaatatacagtttccaaacctgacgactcttcttcttgtaatggctgcccttttcctacctgaggccgtcttagagaaaggggccagtctcctctaatgctcagatttcccatagttggcttttgctgtgtctcctgcctcaggcagtgtcatttctgggagcaggtggttgtagtccaggcccctccccagcagggtctgcccaggctccttcgagcccctttccccgcctcctctcagcctgtccggatgacagtgttcgcctcctgtttagactgtacactcttcaggggtaggggtgccgtcagttcttcaatcagctggcacacacttgtatagtgaaatgtttacatgtgggaaaactccgccttagacaaactaccaaagtacaatcgtgtctctctctagccggaatgctacagagagaaatggaaccttagatttgcaacaaaagtctgtaaactggtctgtttgccaaagtgaacactggatgactaaggagctgaagaaggcccccagaagcggatttgtggtgggttattttattttgcctgtggccaatcttctgtgaaatacaatgtgctgttggtgcaacagatgattcaataaatgtctacagcagacctct

SEQ ID NO: 8327 - protein, 85 aa, Homo sapiens [sequence omitted]

SEQ ID NO: 8328 - DNA, 3261 bp, Homo sapiens
cgcatctcaggcgcagtctctaggggctgtgcgcatccgtgggggggacatgcgcatctcaggggggctgctcgcatctgggggtgctgtgtgcatctcgggggggctgtgcccatctagcggggtggctgtgcgcatctggagggggctgtgcgcaacccggggggggtgttgcgcgcatctagcaggggcggctgtgcgcatttcggggggggctgtgcatatctggggggaccgtgcttatctccgggggcggctgtgcgcatcttgaggggtgtgtacatctcggggggcctgtgcgcatcttggggggctgtgtgcatccgcgggggctgtgcgcatctcggggtgctgtgcgctgctcctctgagctctgctctttcttgcagcgtttgcctcagcatggagggcggggccgcggcagccacccccacagcactgccttactacgtggccttctcccagctgctgggcctgaccttggtggccatgaccggcgcgtggctcgggctgtaccgaggcggcattgcctgggagagcgacctgcagttcaacgcgcaccccctctgcatggtcataggcctgatcttcctgcagggaaatgccctgctggtttaccgtgtcttcaggaacgaagctaaacgcaccaccaaggtcctgcacgggctgctgcacatctttgcgctcgtcatcgccctggttggcttggtggcggtgttcgactaccacaggaagaagggctacgctgacctgtacagcctacacagctggtgcgggatccttgtctttgtcctgtactttgtgcagtggctggtgggcttcagcttcttcctgttccccggagcttcattctccctgcggagccgctaccgcccacagcacatcttctttggtgctaccatcttcctcctttccgtgggcaccgccctgctgggcctgaaggaggcactgctgttcaacctcgggggcaagtatagcgcatttgagcccgagggtgtcctggccaacgtgctgggcctgctgctggcctgcttcggtggggcggtgctctacatcttgacccgggccgactggaagcggccttcccaggcggaagagcaggccctctccatggacttcaagacgctgacggagggagatagccccggctcccagtgatgcgcccggccggccctgggggttcgcggggtgtcttcttgcctgcccctgctgaggcgtcttcaggactgcaggctccggagagtggctctggcagcaggcgggcgcgtgggtgcagctgcatctgtttgagtgctgctttctggggtcaggtctccgcctcctctgcttctcctttctccgctgctatagaccagttcattgtgtgtggctcccgtgtctctgttgcccccttcagtgcagaaggctttgggtaggacttcgggtgttcggtcctggtcgcagagcacagatctttaaagaagcgagagaggaggccccaccctcctggcagcagatgcctggggcaaggccaggggaaactgggggggcctcagggacaggcctggaaaggccacgatggctgctgaattcaaacaaggagtccctccagcctgaataacacgtggcacaaatgggcccggcctttggcagaggagcaagtgatatgatgtgtaaagtatgttggtggtgaaagcaaggttccccaggagaggggagggactggcccctgggaagctctgagatgaggctgtggcccagctgtagtcctgaccttcctcttctttaaccctttagccctaggatggctttggtgggagaggggatagaagcccatgacttcagacagactttctcttggcagatgcaggcgggcctcctcccaggctgctccagacatgggggttggggatggggggcaccttgcagccccttcctgctggggctccctccttgtagcaccccccttgcggctcagctctggtttcctctcccaggctcacccaggctctgctcaggctgggaggcagagggcacaaaccttataattttttaaatgaaaaaccgctgctgctggctgtggctagagccccctggggctgctggagctgctgcctctgttctggaggacgagccttctccttatctgctgcccatctttccaggaagtcaggatggagtcagaacaactacagtcatcccccgtggtgtctgcacatcactccagccccataaagagtgtcatgttagctgagtcaccatttggcttcggcctggaaatagtgtgattagaacactgatcgtgtgcgaggccaggagatcaagaccatcctgactaacaaacacagtgaaaccccgtctctactaaaaatacaaaaaaattagccaggcgtggtggtgggcgcctgtagtcccagctacttgggaggctgaggcaggagaatggtgtgaacccgggagatggcgcttgcagtgagctgagattgcactccagcctgggcgacaggctcaaaaaagaaaaaaaaaagaacaccgatcatgtgcttcttggatctggtgactgttctctccctgttttcctttctttttgggtgtttgaggagcatggcttagcttgagacacacacagacactgtgtacttcagtgaagggcttaatatacagtttccaaacctgacgactcttcttcttgtaatggctgcccttttcctacctgaggccgtcttagagaaaggggccagtctcctctaatgctcagatttcccatagttggcttttgctgtgtctcctgcctcaggcagtgtcatttctgggagcaggtggttgtagtccaggcccctccccagcagggtctgcccaggctccttcgagcccctttccccgcctcctctcagcctgtccggatgacagtgttcgcctcctgtttagactgtacactcttcaggggtaggggtgccgtcagttcttcaatcagctggcacacacttgtatagtgaaatgtttacatgtgggaaaactccgccttagacaaactaccaaagtacaatcgtgtctctctctagccggaatgctacagagagaaatggaaccttagatttgcaacaaaagtctgtaaactggtctgtttgccaaagtgaacactggatgactaaggagctgaagaaggcccccagaagcggatttgtggtgggttattttattttgcctgtggccaatcttctgtgaaatacaatgtgctgttggtgcaacagatgattcaataaatgtctacagcagacctct

SEQ ID NO: 8329 - protein, 251 aa, Homo sapiens; identical to SEQ ID NO: 1162

SEQ ID NO: 8330 - DNA, 3021 bp, Homo sapiens
tctttccttgcaccctcaccgcatatggaactcctggcgtcgtgtcccaggtcacgcctgtccccgtggggaggctgggcccctccccccagccactcccgagacttgagacctctgcctcaggacgatgggtgggaaggggcttgcggcgtttgcctcagcatggagggcggggccgcggcagccacccccacagcactgccttactacgtggccttctcccagctgctgggcctgaccttggtggccatgaccggcgcgtggctcgggctgtaccgaggcggcattgcctgggagagcgacctgcagttcaacgcgcaccccctctgcatggtcataggcctgatcttcctgcagggaaatgccctgctggtttaccgtgtcttcaggaacgaagctaaacgcaccaccaaggtcctgcacgggctgctgcacatctttgcgctcgtcatcgccctggttggcttggtggcggtgttcgactaccacaggaagaagggctacgctgacctgtacagcctacacagctggtgcgggatccttgtctttgtcctgtactttgtgcagtggctggtgggcttcagcttcttcctgttccccggagcttcattctccctgcggagccgctaccgcccacagcacatcttctttggtgctaccatcttcctcctttccgtgggcaccgccctgctgggcctgaaggaggcactgctgttcaacctcgggggcaagtatagcgcatttgagcccgagggtgtcctggccaacgtgctgggcctgctgctggcctgcttcggtggggcggtgctctacatcttgacccgggccgactggaagcggccttcccaggcggaagagcaggccctctccatggacttcaagacgctgacggagggagatagccccggctcccagtgatgcgcccggccggccctgggggttcgcggggtgtcttcttgcctgcccctgctgaggcgtcttcaggactgcaggctccggagagtggctctggcagcaggcgggcgcgtgggtgcagctgcatctgtttgagtgctgctttctggggtcaggtctccgcctcctctgcttctcctttctccgctgctatagaccagttcattgtgtgtggctcccgtgtctctgttgcccccttcagtgcagaaggctttgggtaggacttcgggtgttcggtcctggtcgcagagcacagatctttaaagaagcgagagaggaggccccaccctcctggcagcagatgcctggggcaaggccaggggaaactgggggggcctcagggacaggcctggaaaggccacgatggctgctgaattcaaacaaggagtccctccagcctgaataacacgtggcacaaatgggcccggcctttggcagaggagcaagtgatatgatgtgtaaagtatgttggtggtgaaagcaaggttccccaggagaggggagggactggcccctgggaagctctgagatgaggctgtggcccagctgtagtcctgaccttcctcttctttaaccctttagccctaggatggctttggtgggagaggggatagaagcccatgacttcagacagactttctcttggcagatgcaggcgggcctcctcccaggctgctccagacatgggggttggggatggggggcaccttgcagccccttcctgctggggctccctccttgtagcaccccccttgcggctcagctctggtttcctctcccaggctcacccaggctctgctcaggctgggaggcagagggcacaaaccttataattttttaaatgaaaaaccgctgctgctggctgtggctagagccccctggggctgctggagctgctgcctctgttctggaggacgagccttctccttatctgctgcccatctttccaggaagtcaggatggagtcagaacaactacagtcatcccccgtggtgtctgcacatcactccagccccataaagagtgtcatgttagctgagtcaccatttggcttcggcctggaaatagtgtgattagaacactgatcgtgtgcgaggccaggagatcaagaccatcctgactaacaaacacagtgaaaccccgtctctactaaaaatacaaaaaaattagccaggcgtggtggtgggcgcctgtagtcccagctacttgggaggctgaggcaggagaatggtgtgaacccgggagatggcgcttgcagtgagctgagattgcactccagcctgggcgacaggctcaaaaaagaaaaaaaaaagaacaccgatcatgtgcttcttggatctggtgactgttctctccctgttttcctttctttttgggtgtttgaggagcatggcttagcttgagacacacacagacactgtgtacttcagtgaagggcttaatatacagtttccaaacctgacgactcttcttcttgtaatggctgcccttttcctacctgaggccgtcttagagaaaggggccagtctcctctaatgctcagatttcccatagttggcttttgctgtgtctcctgcctcaggcagtgtcatttctgggagcaggtggttgtagtccaggcccctccccagcagggtctgcccaggctccttcgagcccctttccccgcctcctctcagcctgtccggatgacagtgttcgcctcctgtttagactgtacactcttcaggggtaggggtgccgtcagttcttcaatcagctggcacacacttgtatagtgaaatgtttacatgtgggaaaactccgccttagacaaactaccaaagtacaatcgtgtctctctctagccggaatgctacagagagaaatggaaccttagatttgcaacaaaagtctgtaaactggtctgtttgccaaagtgaacactggatgactaaggagctgaagaaggcccccagaagcggatttgtggtgggttattttattttgcctgtggccaatcttctgtgaaatacaatgtgctgttggtgcaacagatgattcaataaatgtctacagcagacctct

SEQ ID NO: 8331 - protein, 297 aa, Homo sapiens
MELLASCPRSRLSPWGGWAPPPSHSRDLRPLPQDDGWEGACGVCLSMEGGAAAATPTALPYYVAFSQLLGLTLVAMTGAWLGLYRGGIAWESDLQFNAHPLCMVIGLIFLQGNALLVYRVFRNEAKRTTKVLHGLLHIFALVIALVGLVAVFDYHRKKGYADLYSLHSWCGILVFVLYFVQWLVGFSFFLFPGASFSLRSRYRPQHIFFGATIFLLSVGTALLGLKEALLFNLGGKYSAFEPEGVLANVLGLLLACFGGAVLYILTRADWKRPSQAEEQALSMDFKTLTEGDSPGSQ

SEQ ID NO: 8332 - DNA, 2829 bp, Homo sapiens
cttctttcagtacattttcctgttagactcggggtattagagacccaaagatacccaaggaggagtgagagcgtccctgccttcgaggagcagacagggcaccgcgaggcgtttgcctcagcatggagggcggggccgcggcagccacccccacagcactgccttactacgtggccttctcccagctgctgggcctgaccttggtggccatgaccggcgcgtggctcgggctgtaccgaggcggcattgcctgggagagcgacctgcagttcaacgcgcaccccctctgcatggtcataggcctgatcttcctgcagggaaatgccctgctggtttaccgtgtcttcaggaacgaagctaaacgcaccaccaaggtcctgcacgggctgctgcacatctttgcgctcgtcatcgccctggttggcttggtggcggtgttcgactaccacaggaagaagggctacgctgacctgtacagcctacacagctggtgcgggatccttgtctttgtcctgtactttgtgcagtggctggtgggcttcagcttcttcctgttccccggagcttcattctccctgcggagccgctaccgcccacagcacatcttctttggtgctctacatcttgacccgggccgactggaagcggccttcccaggcggaagagcaggccctctccatggacttcaagacgctgacggagggagatagccccggctcccagtgatgcgcccggccggccctgggggttcgcggggtgtcttcttgcctgcccctgctgaggcgtcttcaggactgcaggctccggagagtggctctggcagcaggcgggcgcgtgggtgcagctgcatctgtttgagtgctgctttctggggtcaggtctccgcctcctctgcttctcctttctccgctgctatagaccagttcattgtgtgtggctcccgtgtctctgttgcccccttcagtgcagaaggctttgggtaggacttcgggtgttcggtcctggtcgcagagcacagatctttaaagaagcgagagaggaggccccaccctcctggcagcagatgcctggggcaaggccaggggaaactgggggggcctcagggacaggcctggaaaggccacgatggctgctgaattcaaacaaggagtccctccagcctgaataacacgtggcacaaatgggcccggcctttggcagaggagcaagtgatatgatgtgtaaagtatgttggtggtgaaagcaaggttccccaggagaggggagggactggcccctgggaagctctgagatgaggctgtggcccagctgtagtcctgaccttcctcttctttaaccctttagccctaggatggctttggtgggagaggggatagaagcccatgacttcagacagactttctcttggcagatgcaggcgggcctcctcccaggctgctccagacatgggggttggggatggggggcaccttgcagccccttcctgctggggctccctccttgtagcaccccccttgcggctcagctctggtttcctctcccaggctcacccaggctctgctcaggctgggaggcagagggcacaaaccttataattttttaaatgaaaaaccgctgctgctggctgtggctagagccccctggggctgctggagctgctgcctctgttctggaggacgagccttctccttatctgctgcccatctttccaggaagtcaggatggagtcagaacaactacagtcatcccccgtggtgtctgcacatcactccagccccataaagagtgtcatgttagctgagtcaccatttggcttcggcctggaaatagtgtgattagaacactgatcgtgtgcgaggccaggagatcaagaccatcctgactaacaaacacagtgaaaccccgtctctactaaaaatacaaaaaaattagccaggcgtggtggtgggcgcctgtagtcccagctacttgggaggctgaggcaggagaatggtgtgaacccgggagatggcgcttgcagtgagctgagattgcactccagcctgggcgacaggctcaaaaaagaaaaaaaaaagaacaccgatcatgtgcttcttggatctggtgactgttctctccctgttttcctttctttttgggtgtttgaggagcatggcttagcttgagacacacacagacactgtgtacttcagtgaagggcttaatatacagtttccaaacctgacgactcttcttcttgtaatggctgcccttttcctacctgaggccgtcttagagaaaggggccagtctcctctaatgctcagatttcccatagttggcttttgctgtgtctcctgcctcaggcagtgtcatttctgggagcaggtggttgtagtccaggcccctccccagcagggtctgcccaggctccttcgagcccctttccccgcctcctctcagcctgtccggatgacagtgttcgcctcctgtttagactgtacactcttcaggggtaggggtgccgtcagttcttcaatcagctggcacacacttgtatagtgaaatgtttacatgtgggaaaactccgccttagacaaactaccaaagtacaatcgtgtctctctctagccggaatgctacagagagaaatggaaccttagatttgcaacaaaagtctgtaaactggtctgtttgccaaagtgaacactggatgactaaggagctgaagaaggcccccagaagcggatttgtggtgggttattttattttgcctgtggccaatcttctgtgaaatacaatgtgctgttggtgcaacagatgattcaataaatgtctacagcagacctct

SEQ ID NO: 8333 - protein, 195 aa, Homo sapiens [sequence omitted]

SEQ ID NO: 8334 - DNA, 2998 bp, Homo sapiens
gaccaggggggacagcacttctttcagtacattttcctgttagactcggggtattagagacccaaagatacccaaggaggagtgagagcgtccctgccttcgaggagcagacagggcaccgcgaggcgtttgcctcagcatggagggcggggccgcggcagccacccccacagcactgccttactacgtggccttctcccagctgctgggcctgaccttggtggccatgaccggcgcgtggctcgggctgtaccgaggcggcattgcctgggagagcgacctgcagttcaacgcgcaccccctctgcatggtcataggcctgatcttcctgcagggaaatgccctgctggtttaccgtgtcttcaggaacgaagctaaacgcaccaccaaggtcctgcacgggctgctgcacatctttgcgctcgtcatcgccctggttggcttggtggcggtgttcgactaccacaggaagaagggctacgctgacctgtacagcctacacagctggtgcgggatccttgtctttgtcctgtactttgtgcagtggctggtgggcttcagcttcttcctgttccccggagcttcattctccctgcggagccgctaccgcccacagcacatcttctttggtgctaccatcttcctcctttccgtgggcaccgccctgctgggcctgaaggaggcactgctgttcaacctcgggggcaagtatagcgcatttgagcccgagggtgtcctggccaacgtgctgggcctgctgctggcctgcttcggtggggcggtgctctacatcttgacccgggccgactggaagcggccttcccaggcggaagagcaggccctctccatggacttcaagacgctgacggagggagatagccccggctcccagtgatgcgcccggccggccctgggggttcgcggggtgtcttcttgcctgcccctgctgaggcgtcttcaggactgcaggctccggagagtggctctggcagcaggcgggcgcgtgggtgcagctgcatctgtttgagtgctgctttctggggtcaggtctccgcctcctctgcttctcctttctccgctgctatagaccagttcattgtgtgtggctcccgtgtctctgttgcccccttcagtgcagaaggctttgggtaggacttcgggtgttcggtcctggtcgcagagcacagatctttaaagaagcgagagaggaggccccaccctcctggcagcagatgcctggggcaaggccaggggaaactgggggggcctcagggacaggcctggaaaggccacgatggctgctgaattcaaacaaggagtccctccagcctgaataacacgtggcacaaatgggcccggcctttggcagaggagcaagtgatatgatgtgtaaagtatgttggtggtgaaagcaaggttccccaggagaggggagggactggcccctgggaagctctgagatgaggctgtggcccagctgtagtcctgaccttcctcttctttaaccctttagccctaggatggctttggtgggagaggggatagaagcccatgacttcagacagactttctcttggcagatgcaggcgggcctcctcccaggctgctccagacatgggggttggggatggggggcaccttgcagccccttcctgctggggctccctccttgtagcaccccccttgcggctcagctctggtttcctctcccaggctcacccaggctctgctcaggctgggaggcagagggcacaaaccttataattttttaaatgaaaaaccgctgctgctggctgtggctagagccccctggggctgctggagctgctgcctctgttctggaggacgagccttctccttatctgctgcccatctttccaggaagtcaggatggagtcagaacaactacagtcatcccccgtggtgtctgcacatcactccagccccataaagagtgtcatgttagctgagtcaccatttggcttcggcctggaaatagtgtgattagaacactgatcgtgtgcgaggccaggagatcaagaccatcctgactaacaaacacagtgaaaccccgtctctactaaaaatacaaaaaaattagccaggcgtggtggtgggcgcctgtagtcccagctacttgggaggctgaggcaggagaatggtgtgaacccgggagatggcgcttgcagtgagctgagattgcactccagcctgggcgacaggctcaaaaaagaaaaaaaaaagaacaccgatcatgtgcttcttggatctggtgactgttctctccctgttttcctttctttttgggtgtttgaggagcatggcttagcttgagacacacacagacactgtgtacttcagtgaagggcttaatatacagtttccaaacctgacgactcttcttcttgtaatggctgcccttttcctacctgaggccgtcttagagaaaggggccagtctcctctaatgctcagatttcccatagttggcttttgctgtgtctcctgcctcaggcagtgtcatttctgggagcaggtggttgtagtccaggcccctccccagcagggtctgcccaggctccttcgagcccctttccccgcctcctctcagcctgtccggatgacagtgttcgcctcctgtttagactgtacactcttcaggggtaggggtgccgtcagttcttcaatcagctggcacacacttgtatagtgaaatgtttacatgtgggaaaactccgccttagacaaactaccaaagtacaatcgtgtctctctctagccggaatgctacagagagaaatggaaccttagatttgcaacaaaagtctgtaaactggtctgtttgccaaagtgaacactggatgactaaggagctgaagaaggcccccagaagcggatttgtggtgggttattttattttgcctgtggccaatcttctgtgaaatacaatgtgctgttggtgcaacagatgattcaataaatgtctacagcagacctct

SEQ ID NO: 8335 - protein, 251 aa, Homo sapiens; identical to SEQ ID NO: 1162

SEQ ID NO: 8336 - DNA, 2936 bp, Homo sapiens
gtgaagatctgcgggtcatgctgtccctaatgcgctgattgcattaagtggattctggctgcagcgtttgcctcagcatggagggcggggccgcggcagccacccccacagcactgccttactacgtggccttctcccagctgctgggcctgaccttggtggccatgaccggcgcgtggctcgggctgtaccgaggcggcattgcctgggagagcgacctgcagttcaacgcgcaccccctctgcatggtcataggcctgatcttcctgcagggaaatgccctgctggtttaccgtgtcttcaggaacgaagctaaacgcaccaccaaggtcctgcacgggctgctgcacatctttgcgctcgtcatcgccctggttggcttggtggcggtgttcgactaccacaggaagaagggctacgctgacctgtacagcctacacagctggtgcgggatccttgtctttgtcctgtactttgtgcagtggctggtgggcttcagcttcttcctgttccccggagcttcattctccctgcggagccgctaccgcccacagcacatcttctttggtgctaccatcttcctcctttccgtgggcaccgccctgctgggcctgaaggaggcactgctgttcaacctcgggggcaagtatagcgcatttgagcccgagggtgtcctggccaacgtgctgggcctgctgctggcctgcttcggtggggcggtgctctacatcttgacccgggccgactggaagcggccttcccaggcggaagagcaggccctctccatggacttcaagacgctgacggagggagatagccccggctcccagtgatgcgcccggccggccctgggggttcgcggggtgtcttcttgcctgcccctgctgaggcgtcttcaggactgcaggctccggagagtggctctggcagcaggcgggcgcgtgggtgcagctgcatctgtttgagtgctgctttctggggtcaggtctccgcctcctctgcttctcctttctccgctgctatagaccagttcattgtgtgtggctcccgtgtctctgttgcccccttcagtgcagaaggctttgggtaggacttcgggtgttcggtcctggtcgcagagcacagatctttaaagaagcgagagaggaggccccaccctcctggcagcagatgcctggggcaaggccaggggaaactgggggggcctcagggacaggcctggaaaggccacgatggctgctgaattcaaacaaggagtccctccagcctgaataacacgtggcacaaatgggcccggcctttggcagaggagcaagtgatatgatgtgtaaagtatgttggtggtgaaagcaaggttccccaggagaggggagggactggcccctgggaagctctgagatgaggctgtggcccagctgtagtcctgaccttcctcttctttaaccctttagccctaggatggctttggtgggagaggggatagaagcccatgacttcagacagactttctcttggcagatgcaggcgggcctcctcccaggctgctccagacatgggggttggggatggggggcaccttgcagccccttcctgctggggctccctccttgtagcaccccccttgcggctcagctctggtttcctctcccaggctcacccaggctctgctcaggctgggaggcagagggcacaaaccttataattttttaaatgaaaaaccgctgctgctggctgtggctagagccccctggggctgctggagctgctgcctctgttctggaggacgagccttctccttatctgctgcccatctttccaggaagtcaggatggagtcagaacaactacagtcatcccccgtggtgtctgcacatcactccagccccataaagagtgtcatgttagctgagtcaccatttggcttcggcctggaaatagtgtgattagaacactgatcgtgtgcgaggccaggagatcaagaccatcctgactaacaaacacagtgaaaccccgtctctactaaaaatacaaaaaaattagccaggcgtggtggtgggcgcctgtagtcccagctacttgggaggctgaggcaggagaatggtgtgaacccgggagatggcgcttgcagtgagctgagattgcactccagcctgggcgacaggctcaaaaaagaaaaaaaaaagaacaccgatcatgtgcttcttggatctggtgactgttctctccctgttttcctttctttttgggtgtttgaggagcatggcttagcttgagacacacacagacactgtgtacttcagtgaagggcttaatatacagtttccaaacctgacgactcttcttcttgtaatggctgcccttttcctacctgaggccgtcttagagaaaggggccagtctcctctaatgctcagatttcccatagttggcttttgctgtgtctcctgcctcaggcagtgtcatttctgggagcaggtggttgtagtccaggcccctccccagcagggtctgcccaggctccttcgagcccctttccccgcctcctctcagcctgtccggatgacagtgttcgcctcctgtttagactgtacactcttcaggggtaggggtgccgtcagttcttcaatcagctggcacacacttgtatagtgaaatgtttacatgtgggaaaactccgccttagacaaactaccaaagtacaatcgtgtctctctctagccggaatgctacagagagaaatggaaccttagatttgcaacaaaagtctgtaaactggtctgtttgccaaagtgaacactggatgactaaggagctgaagaaggcccccagaagcggatttgtggtgggttattttattttgcctgtggccaatcttctgtgaaatacaatgtgctgttggtgcaacagatgattcaataaatgtctacagcagacctct

SEQ ID NO: 8337 - protein, 251 aa, Homo sapiens; identical to SEQ ID NO: 1162

SEQ ID NO: 8338 - DNA, 3087 bp, Homo sapiens
tgcggccgcgcactggactgcggcgccgacccgcaccctgggcccgagggctgcagggctcgcccgccctctcggagccgagcctctcccggtccaggcggcccctgccctggcctgcccgggtgccgggtctctgctgaagttagaaccgagacccccgcttgctggtgaccccgagtttggatctttgctcctgcgccgcgttctagagcaagcgtttgcctcagcatggagggcggggccgcggcagccacccccacagcactgccttactacgtggccttctcccagctgctgggcctgaccttggtggccatgaccggcgcgtggctcgggctgtaccgaggcggcattgcctgggagagcgacctgcagttcaacgcgcaccccctctgcatggtcataggcctgatcttcctgcagggaaatgccctgctggtttaccgtgtcttcaggaacgaagctaaacgcaccaccaaggtcctgcacgggctgctgcacatctttgcgctcgtcatcgccctggttggcttggtggcggtgttcgactaccacaggaagaagggctacgctgacctgtacagcctacacagctggtgcgggatccttgtctttgtcctgtactttgtgcagtggctggtgggcttcagcttcttcctgttccccggagcttcattctccctgcggagccgctaccgcccacagcacatcttctttggtgctaccatcttcctcctttccgtgggcaccgccctgctgggcctgaaggaggcactgctgttcaacctcgggggcaagtatagcgcatttgagcccgagggtgtcctggccaacgtgctgggcctgctgctggcctgcttcggtggggcggtgctctacatcttgacccgggccgactggaagcggccttcccaggcggaagagcaggccctctccatggacttcaagacgctgacggagggagatagccccggctcccagtgatgcgcccggccggccctgggggttcgcggggtgtcttcttgcctgcccctgctgaggcgtcttcaggactgcaggctccggagagtggctctggcagcaggcgggcgcgtgggtgcagctgcatctgtttgagtgctgctttctggggtcaggtctccgcctcctctgcttctcctttctccgctgctatagaccagttcattgtgtgtggctcccgtgtctctgttgcccccttcagtgcagaaggctttgggtaggacttcgggtgttcggtcctggtcgcagagcacagatctttaaagaagcgagagaggaggccccaccctcctggcagcagatgcctggggcaaggccaggggaaactgggggggcctcagggacaggcctggaaaggccacgatggctgctgaattcaaacaaggagtccctccagcctgaataacacgtggcacaaatgggcccggcctttggcagaggagcaagtgatatgatgtgtaaagtatgttggtggtgaaagcaaggttccccaggagaggggagggactggcccctgggaagctctgagatgaggctgtggcccagctgtagtcctgaccttcctcttctttaaccctttagccctaggatggctttggtgggagaggggatagaagcccatgacttcagacagactttctcttggcagatgcaggcgggcctcctcccaggctgctccagacatgggggttggggatggggggcaccttgcagccccttcctgctggggctccctccttgtagcaccccccttgcggctcagctctggtttcctctcccaggctcacccaggctctgctcaggctgggaggcagagggcacaaaccttataattttttaaatgaaaaaccgctgctgctggctgtggctagagccccctggggctgctggagctgctgcctctgttctggaggacgagccttctccttatctgctgcccatctttccaggaagtcaggatggagtcagaacaactacagtcatcccccgtggtgtctgcacatcactccagccccataaagagtgtcatgttagctgagtcaccatttggcttcggcctggaaatagtgtgattagaacactgatcgtgtgcgaggccaggagatcaagaccatcctgactaacaaacacagtgaaaccccgtctctactaaaaatacaaaaaaattagccaggcgtggtggtgggcgcctgtagtcccagctacttgggaggctgaggcaggagaatggtgtgaacccgggagatggcgcttgcagtgagctgagattgcactccagcctgggcgacaggctcaaaaaagaaaaaaaaaagaacaccgatcatgtgcttcttggatctggtgactgttctctccctgttttcctttctttttgggtgtttgaggagcatggcttagcttgagacacacacagacactgtgtacttcagtgaagggcttaatatacagtttccaaacctgacgactcttcttcttgtaatggctgcccttttcctacctgaggccgtcttagagaaaggggccagtctcctctaatgctcagatttcccatagttggcttttgctgtgtctcctgcctcaggcagtgtcatttctgggagcaggtggttgtagtccaggcccctccccagcagggtctgcccaggctccttcgagcccctttccccgcctcctctcagcctgtccggatgacagtgttcgcctcctgtttagactgtacactcttcaggggtaggggtgccgtcagttcttcaatcagctggcacacacttgtatagtgaaatgtttacatgtgggaaaactccgccttagacaaactaccaaagtacaatcgtgtctctctctagccggaatgctacagagagaaatggaaccttagatttgcaacaaaagtctgtaaactggtctgtttgccaaagtgaacactggatgactaaggagctgaagaaggcccccagaagcggatttgtggtgggttattttattttgcctgtggccaatcttctgtgaaatacaatgtgctgttggtgcaacagatgattcaataaatgtctacagcagacctct

SEQ ID NO: 8339 - protein, 251 aa, Homo sapiens; identical to SEQ ID NO: 1162

SEQ ID NO: 8340 - DNA, 2882 bp, Homo sapiens
tgcggccgcgcactggactgcggcgccgacccgcaccctgggcccgagggctgcagggctcgcccgccctctcggagccgagcctctcccggtccaggcggcccctgccctggcctgcccgggtgccgggtctctgctgaagttagaaccgagacccccgcttgctggtgaccccgagtttggatctttgctcctgcgccgcgttctagagcaagcgtttgcctcagcatggagggcggggccgcggcagccacccccacagcactgccttactacgtggccttctcccagctgctgggcctgaccttggtggccatgaccggcgcgtggctcgggctgtaccgaggcggcattgcctgggagagcgacctgcagttcaacgcgcaccccctctgcatggtcataggcctgatcttcctgcagggaaatgccctgctggtttacccttcttcctgttccccggagcttcattctccctgcggagccgctaccgcccacagcacatcttctttggtgctaccatcttcctcctttccgtgggcaccgccctgctgggcctgaaggaggcactgctgttcaacctcgggggcaagtatagcgcatttgagcccgagggtgtcctggccaacgtgctgggcctgctgctggcctgcttcggtggggcggtgctctacatcttgacccgggccgactggaagcggccttcccaggcggaagagcaggccctctccatggacttcaagacgctgacggagggagatagccccggctcccagtgatgcgcccggccggccctgggggttcgcggggtgtcttcttgcctgcccctgctgaggcgtcttcaggactgcaggctccggagagtggctctggcagcaggcgggcgcgtgggtgcagctgcatctgtttgagtgctgctttctggggtcaggtctccgcctcctctgcttctcctttctccgctgctatagaccagttcattgtgtgtggctcccgtgtctctgttgcccccttcagtgcagaaggctttgggtaggacttcgggtgttcggtcctggtcgcagagcacagatctttaaagaagcgagagaggaggccccaccctcctggcagcagatgcctggggcaaggccaggggaaactgggggggcctcagggacaggcctggaaaggccacgatggctgctgaattcaaacaaggagtccctccagcctgaataacacgtggcacaaatgggcccggcctttggcagaggagcaagtgatatgatgtgtaaagtatgttggtggtgaaagcaaggttccccaggagaggggagggactggcccctgggaagctctgagatgaggctgtggcccagctgtagtcctgaccttcctcttctttaaccctttagccctaggatggctttggtgggagaggggatagaagcccatgacttcagacagactttctcttggcagatgcaggcgggcctcctcccaggctgctccagacatgggggttggggatggggggcaccttgcagccccttcctgctggggctccctccttgtagcaccccccttgcggctcagctctggtttcctctcccaggctcacccaggctctgctcaggctgggaggcagagggcacaaaccttataattttttaaatgaaaaaccgctgctgctggctgtggctagagccccctggggctgctggagctgctgcctctgttctggaggacgagccttctccttatctgctgcccatctttccaggaagtcaggatggagtcagaacaactacagtcatcccccgtggtgtctgcacatcactccagccccataaagagtgtcatgttagctgagtcaccatttggcttcggcctggaaatagtgtgattagaacactgatcgtgtgcgaggccaggagatcaagaccatcctgactaacaaacacagtgaaaccccgtctctactaaaaatacaaaaaaattagccaggcgtggtggtgggcgcctgtagtcccagctacttgggaggctgaggcaggagaatggtgtgaacccgggagatggcgcttgcagtgagctgagattgcactccagcctgggcgacaggctcaaaaaagaaaaaaaaaagaacaccgatcatgtgcttcttggatctggtgactgttctctccctgttttcctttctttttgggtgtttgaggagcatggcttagcttgagacacacacagacactgtgtacttcagtgaagggcttaatatacagtttccaaacctgacgactcttcttcttgtaatggctgcccttttcctacctgaggccgtcttagagaaaggggccagtctcctctaatgctcagatttcccatagttggcttttgctgtgtctcctgcctcaggcagtgtcatttctgggagcaggtggttgtagtccaggcccctccccagcagggtctgcccaggctccttcgagcccctttccccgcctcctctcagcctgtccggatgacagtgttcgcctcctgtttagactgtacactcttcaggggtaggggtgccgtcagttcttcaatcagctggcacacacttgtatagtgaaatgtttacatgtgggaaaactccgccttagacaaactaccaaagtacaatcgtgtctctctctagccggaatgctacagagagaaatggaaccttagatttgcaacaaaagtctgtaaactggtctgtttgccaaagtgaacactggatgactaaggagctgaagaaggcccccagaagcggatttgtggtgggttattttattttgcctgtggccaatcttctgtgaaatacaatgtgctgttggtgcaacagatgattcaataaatgtctacagcagacctct

SEQ ID NO: 8341 - protein, 110 aa, Homo sapiens
MEGGAAAATPTALPYYVAFSQLLGLTLVAMTGAWLGLYRGGIAWESDLQFNAHPLCMVIGLIFLQGNALLVYPSSCSPELHSPCGAATAHSTSSLVLPSSSFPWAPPCWA

SEQ ID NO: 8342 - DNA, 1128 bp, Homo sapiens
tctttccttgcaccctcaccgcatatggaactcctggcgtcgtgtcccaggtcacgcctgtccccgtggggaggctgggcccctccccccagccactcccgagacttgagacctctgcctcaggacgatgggtgggaaggggcttgcggcgtttgcctcagcatggagggcggggccgcggcagccacccccacagcactgccttactacgtggccttctcccagctgctgggcctgaccttggtggccatgaccggcgcgtggctcgggctgtaccgaggcggcattgcctgggagagcgacctgcagttcaacgcgcaccccctctgcatggtcataggcctgatcttcctgcagggaaatgccctgctggtttaccgtgtcttcaggaacgaagctaaacgcaccaccaaggtcctgcacgggctgctgcacatctttgcgctcgtcatcgccctggttggcttggtggcggtgttcgactaccacaggaagaagggctacgctgacctgtacagcctacacagctggtgcgggatccttgtctttgtcctgtactttgtgcagtggctggtgggcttcagcttcttcctgttccccggagcttcattctccctgcggagccgctaccgcccacagcacatcttctttggtgctaccatcttcctcctttccgtgggcaccgccctgctgggcctgaaggaggcactgctgttcaacctcgggggcaagtatagcgcatttgagcccgagggtgtcctggccaacgtgctgggcctgctgctggcctgcttcggtggggcggtgctctacatcttgacccgggccgactggaagcggccttcccaggcggaagagcaggccctctccatggacttcaagacgctgacggagggagatagccccggctcccagtgatgcgcccggccggccctgggggttcgcggggtgtcttcttgcctgcccctgctgaggcgtcttcaggactgcaggctccggagagtggctctggcagcaggcgggcgcgtgggtgcagctgcatctgtttgagtgctgctttctggggtcaggtctccgcctcctctgcttctcctttctccgctgctatagaccagttcattgtgtgtg

SEQ ID NO: 8343 - protein, 297 aa, Homo sapiens; identical to SEQ ID NO: 8331

SEQ ID NO: 8344 - DNA, 242 bp, Homo sapiens
aacgaagctaaacgcaccaccaaggtcctgcacgggctgctgcacatctttgcgctcgtcatcgccctggttggcttggtggcggtgttcgactaccacaggaagaagggctacgctgacctgtacagcctacacagctggtgcgggatccttgtctttgtcctgtactttgtgcaggtgagtccttccaacaccccgggcctggggccacctaccagggaggtgggaggaggaggggagct

SEQ ID NO: 8345 - protein, 79 aa, Homo sapiens
NEAKRTTKVLHGLLHIFALVIALVGLVAVFDYHRKKGYADLYSLHSWCGILVFVLYFVQVSPSNTPGLGPPTREVGGGG

SEQ ID NO: 8346 - DNA, 7423 bp, Homo sapiens
ccgccgcctccgagcagccgcgggccgccctccactccgagcggggggcgcggcggcgacagctgggcagcggctttgggctccgcggggaccgcgccgccgcccccgtgagttattctcacgtcccccggggctcgctgccgcccccgccgacgcctagagtccggcccgggcccaactccctcacgggccccccggcggcagcggcggcggcggcggcggcagcggcggagcccaccgcccgggccccgatgagtaactcccggaataaccgggtgatggtggaaggggttggcgctcgggtagtgcgcggcccggactggaagtgggggaagcaggacggcggcgagggccatgtgggcaccgtccggagcttcgagagccccgaggaggtggtggtagtgtgggacaacggcacagctgccaactaccgctgctccggggcttacgacctccgcatcctggacagcgcgcccaccggcatcaagcatgatggaaccatgtgtgatacctgccgccagcaaccaatcattggcattcgatggaagtgtgcagagtgtacaaattatgatttgtgcacagtgtgttatcatggagataaacatcatttaagacatcgcttttaccgaattactacaccgggaagtgagagggttctgttagagtctcgtaggaaatctaagaagattacagccagaggaatctttgcaggtgccagagtggtgcgaggagtggactggcagtgggaagatcaagatggaggaaatggacgtaggggaaaggtaacagaaatccaggactggagtgcatcaagcccacatagcgcagcatatgtcctctgggataatggtgctaagaacctttacagagttggctttgagggcatgtctgatctgaaatgtgtccaggatgccaagggaggttctttctacagagatcactgccctgtgctaggtgagcagaatggcaacaggaatcctggtggattgcagattggtgacctggtaaatatagatctcgacctcgaaattgtacagtctttgcagcatggtcatggaggatggactgatggaatgtttgagactttaactacaactggaactgtttgtggcattgatgaagatcatgacattgtagtacagtatccaagtggcaataggtggaccttcaatcctgctgttctcactaaagcgaacattgtccgaagtggagatgctgctcagggtgcagaaggaggcacctcgcagtttcaagtgggtgatcttgtacaagtttgttatgacctggaacgaattaaacttctacaaagaggacatggagaatgggctgaagcgatgcttccaactttaggtaaagttggccgagtacaacagatttattcagacagtgatttaaaggtggaagtttgtggaacatcttggacatacaatccagcagcagtttccaaggtggcatctgcaggatcagccattagcaatgcatctggtgaaagactctcacaactcctgaagaaattatttgaaacccaagaatctggtgacctcaatgaagaattagttaaggctgctgccaatggagatgttgctaaagtggaagatttgcttaaaagaccagatgtggatgtaaatgggcaatgtgctggccacacagctatgcaagctgctagtcagaatggacatgttgacattttgaagttacttttgaagcaaaacgtggatgtcgaagcagaggataaagatggtgatagagcagttcaccatgcagcttttggagatgaaggcgctgttatagaagtactacatcgaggtagtgctgatttgaatgctcgaaacaagcgccgacagacaccacttcatattgctgtcaataaaggtcatcttcaagttgtgaagactttattggactttggctgtcatcccagtctccaggattctgaaggtgatacccctcttcatgatgcaataagtaagaaacgtgatgatatcctagcagttcttttggaagctggagcagatgttaccatcacaaacaataatggatttaatgctctgcatcatgctgcactaaggggaaatcccagtgcaatgcgtgttttactatctaaattaccaagaccatggattgtggatgagaagaaagatgatggttatactgccttacatctggctgcccttaataatcacgtagaagtggctgaactgttggtacatcagggtaatgcaaacctggatatccagaatgtgaaccaacaaactgccctacaccttgctgttgaacgacagcatacccagattgttaggcttttggtccgtgcaggtgccaagcttgatattcaggataaggatggggatactcctttgcatgaagctctaaggcatcacactttgtctcagctacgtcagctccaagatatgcaagatgtggggaaggtggatgctgcctgggagccatccaaaaacacgttaataatgggacttggtacccagggggcagagaagaagagtgcagcatctattgcctgtttcttggcagccaatggtgctgacctgagcattcgaaataagaagggtcaatcgccacttgatctctgtcctgatccgaatctctgcaaagcactggcaaagtgtcataaggaaaaagtcagtggtcaagtgggttctcggagtccttctatgattagtaatgattctgaaaccttagaagagtgtatggtgtgctcagatatgaagagagatactctttttggtccatgtggacatattgctacctgttctttatgttctccacgtgtcaagaaatgcctcatctgtaaagaacaggttcaatccaggacaaagattgaagaatgtgtggtatgctctgacaagaaagcagctgttctttttcaaccctgtggccacatgtgtgcttgtgagaactgtgctaacctgatgaaaaagtgtgtgcagtgtcgagcagtagttgaacgaagagtgcctttcattatgtgctgtggagggaaaagttcagaagatgccactgatgatatctcaagtgggaatattccagtattacaaaaggacaaggataataccaatgtcaatgcagatgtgcaaaagttgcagcaacagttacaagacattaaagagcagacaatgtgccctgtgtgtctagatcgtctgaagaatatgattttcctttgtggtcacggaacctgtcaactctgtggagaccgcatgagtgaatgtcctatctgtcgcaaggctattgaacgaaggattcttttgtattaactaagacacatggtgtattttgttagctaatgtatctagtcatgagatcttaataggcttttgatctagttggaagttctgatgagttaatttctaatatcatagtttctttactagagtataattgggctgtaaatgtaccagaacaaaaaaccctacaaaatggtgttggaaattgtgttttttgtttttgttttaaatttgaaacatcaaattcatgtaactcataggataatttacctttggcttctaagaggaaagtcctttaaggatatccttttttaaaaaattgcatttttctcttataatttgtaaatttgttggatctcaaaagacataattctttgtgatcagttatccttcatttcatcgtggttttacacagtgagttgataacaggttctctgagaagtcatgcatcaaataaaagaggcaggtcaaacaattatgtcacatggtaaattataaaatgacagtacaagttccagatagttaagggaataccgaagggatgattctttttttaagataacaggaagttacccacatgtttgtttctgaattcttagagtaaatggaagcatagaatgagggaataatgactttgcatttctcttgttttctagattcaaaaggaacattgtttaacttgaatcagattaccagtttcaaggtgactgatagacaagaaaaggaaaaataagcaataatagtgggcaactgaagagaaaaaaaaaacgagtatctattaactggccactaacagttgcctttcttacattaatttatacactattttgttcagccagtgtttttaaaaaaaatctatgaaaagtgtacttccggttttctgtgattacttatctgggcttgatctgaccagtgaaatgacattgccctatttggacctctgaggttctatttagctttgcagatgtacatagtatcccagtgatctgcaaaattaatgccttttccaagaaaaaatcttttcttctctgtatcagttaattctgacagtgttagtgattctgtcttcattataggccttatttccattatctctttctttatagtattttttgttataaagaaaacagtctttctgtgtatacctacggatgagggtattatttaaactgccaacaatatccaagacatggtcaataacctaattataaatactttagaaagagtgaccaggacatgtatagaaatgtctgcttacctgtagactttaaaaacaaacaaaatttttggagcatttaatcattttttttctccttttatctcctttgtaatcttattgtctcctgagtaaatatacacataaatgtttggggattcattgctgctagattatatcaggtgtttacatagtgtctactatatgctgttgataagctttttcctaaaaatagttatcctcttttgtagtttttttccctcctttaaatctggctagcttttcttacttcagtttttatagaacaccaactaaatttgaaagtatgaagtctctagccctcttacactgtttctggctgtttaatccttgctgcctttgcaagtcctggtgaaagcaatggggagctttgctggctggttttgtagtctcaacaattccatgtctgtgtttagctgagtaactgctatcatttagaacagtaaaatttttatagatttcaaatttgaaaattcatgtacactcagttatctaataaggggccaccgacgctgtttttaaaactattttgaagttataaaaaggtagaacatctgactgatgatgttcacataaagagacagacagactatcatgttgcagacatgaaaacagcatgtcaggtttttcctttccttccatgccatgggctacccatctcttcccactagatcacctggtgaggagggagcacctggctgactcatgcagagtttggccaatcagagaattgtgtggtctccagctctactttccttaaacaaatcctttctgttttctgagctgcagtgctaaaacagatccctaaaaggtaatagcatcttccagactagtttaattatttcctttataagaatatgacataaatttttattatagaaataatgtcattataattttagtgctagtacttgtgggttttctgtatttgtatcaccttgaaatttgttccatgaatagaaaatacttctttattcatgttttcaatcacttagaattattttaaatttattttgggtttgtgagagataataagattaagaacttcatcatttcagtgactttcctccaactctctgaatctgctacctcttattatatgtcccttagcagtacttttccagttaggttcgttaccctgctcattagctaaacctctttatcttgtgcctcaaaagagcttttacttttcttagaaacatttataaaaaagaaaaaaactgacacgcattcattcaaaaaagtatttattgggctttagggattagatacacaacagtggaaaaatggcatcttagcacactcagaatttattgtgcagcagttgtgtattttaaggaatctgtagttaaaaggaagagatccaaaggtcctgataacatttcctaacgtttcagaagagttgtcattgagtagtgtttggatttcctctctgtatccctcaccctaccattttctcctttattcttctaagattgttagcgttgttactcaaaacatacacatacaacataccagatggtgctgttctaatggtatttgttcacgtaatttaacgttcttactgcttatactatatacatatttaattttgttgggagcaagaaggttttcaagaaaagataattttgtattagtgtaggaatatattagacaaatgtttagttggtcaaattatgcataagatatttgtaactttaaacattgcaaattgaccagctagctatggaagcataaaattaattgataattaatgttggaaatacatttctaaaatttatatttttatggtgttagcctgtaagagcattttagcatattgaaatgcatgctgcttaagatgtgtctggttcaaatatcaaaacttgctgggtcatttttacatagtagaaacatactgtctatgtgttgcccaattgctgtttgtccactctgaattctggaccctttttggactaagaattagttaaattcatgaactaagagaattagagatggggtagagtaggatcaggacagtggggttacaacagataggaaaggaaagtcagcatttgagtgtagagaaaaaaagaggatcatacagatgtcatcaaattataggctttaatacaggttgctttttttaatccaaaaggaaaagcacttatcctatcagaatgtctaccatgttttatagtaataatttgtgtaaaaaattgaatttttgaatagttttttgtattttttgtgatgaaaaactcataacataaaatttaccatattaactgtttctaaagaatacagttcagccatgtgaagtacatttacactgttgtgaagcagatctccagaactttttcatcttgcaaaactgaaactccatacccattaaacaactcccctttttgttttctcctcagtggaatagaattttgactccatataaatcaagaaacacctaaattctttagttgtttgtgtttgcaagatctaaggtcatggtaaacattaagttcttaaaatttttgggagggacagtgcacctctcctctgaattgttagcaattaaattgagtaggttttaaatgtctattcattggaagggtttgttatttcattttgagccagaggggagaggcacattttaaatatcagaattagattagctttgagtttgtacaattgggaacataatagattttcataaattatgtgtgccttgttggaagtgtcaactgtctttatgtctgcttgtaaaagtttcaaaatatgttttccctcaaaaaggcaacgttacttcatttgcttgaatattatgataggaatgcttactgatattacttgatagtcatatatagcctaggaaatttaacatatatataactatagcagtattaataatgatagttgtacttctttaaaacattaaatttgaggaaacttt

SEQ ID NO: 8347 - protein, 1006 aa, Homo sapiens; identical to SEQ ID NO: 1170

SEQ ID NO: 8348 - DNA, 8192 bp, Homo sapiens
ccgccgcctccgagcagccgcgggccgccctccactccgagcggggggcgcggcggcgacagctgggcagcggctttgggctccgcggggaccgcgccgccgcccccgtgagttattctcacgtcccccggggctcgctgccgcccccgccgacgcctagagtccggcccgggcccaactccctcacgggccccccggcggcagcggcggcggcggcggcggcagcggcggagcccaccgcccgggccccgatgagtaactcccggaataaccgggtgatggtggaaggggttggcgctcgggtagtgcgcggcccggactggaagtgggggaagcaggacggcggcgagggccatgtgggcaccgtccggagcttcgagagccccgaggaggtggtggtagtgtgggacaacggcacagctgccaactaccgctgctccggggcttacgacctccgcatcctggacagcgcgcccaccggcatcaagcatgatggaaccatgtgtgatacctgccgccagcaaccaatcattggcattcgatggaagtgtgcagagtgtacaaattatgatttgtgcacagtgtgttatcatggagataaacatcatttaagacatcgcttttaccgaattactacaccgggaagtgagagggttctgttagagtctcgtaggaaatctaagaagattacagccagaggaatctttgcaggtgccagagtggtgcgaggagtggactggcagtgggaagatcaagatggaggaaatggacgtaggggaaaggtaacagaaatccaggactggagtgcatcaagcccacatagcgcagcatatgtcctctgggataatggtgctaagaacctttacagagttggctttgagggcatgtctgatctgaaatgtgtccaggatgccaagggaggttctttctacagagatcactgccctgtgctaggtgagcagaatggcaacaggaatcctggtggattgcagattggtgacctggtaaatatagatctcgacctcgaaattgtacagtctttgcagcatggtcatggaggatggactgatggaatgtttgagactttaactacaactggaactgtttgtggcattgatgaagatcatgacattgtagtacagtatccaagtggcaataggtggaccttcaatcctgctgttctcactaaagcgaacattgtccgaagtggagatgctgctcagggtgcagaaggaggcacctcgcagtttcaagtgggtgatcttgtacaagtttgttatgacctggaacgaattaaacttctacaaagaggacatggagaatgggctgaagcgatgcttccaactttaggtaaagttggccgagtacaacagatttattcagacagtgatttaaaggtggaagtttgtggaacatcttggacatacaatccagcagcagtttccaaggtggcatctgcaggatcagccattagcaatgcatctggtgaaagactctcacaactcctgaagaaattatttgaaacccaagaatctggtgacctcaatgaagaattagttaaggctgctgccaatggagatgttgctaaagtggaagatttgcttaaaagaccagatgtggatgtaaatgggcaatgtgctggccacacagctatgcaagctgctagtcagaatggacatgttgacattttgaagttacttttgaagcaaaacgtggatgtcgaagcagaggataaagatggtgatagagcagttcaccatgcagcttttggagatgaaggcgctgttatagaagtactacatcgaggtagtgctgatttgaatgctcgaaacaagcgccgacagacaccacttcatattgctgtcaataaaggtcatcttcaagttgtgaagactttattggactttggctgtcatcccagtctccaggattctgaaggtgatacccctcttcatgatgcaataagtaagaaacgtgatgatatcctagcagttcttttggaagctggagcagatgttaccatcacaaacaataatggatttaatgctctgcatcatgctgcactaaggggaaatcccagtgcaatgcgtgttttactatctaaattaccaagaccatggattgtggatgagaagaaagatgatggttatactgccttacatctggctgcccttaataatcacgtagaagtggctgaactgttggtacatcagggtaatgcaaacctggatatccagaatgtgaaccaacaaactgccctacaccttgctgttgaacgacagcatacccagattgttaggcttttggtccgtgcaggtgccaagcttgatattcaggataaggatggggatactcctttgcatgaagctctaaggcatcacactttgtctcagctacgtcagctccaagatatgcaagatgtggggaaggtggatgctgcctgggagccatccaaaaacacgttaataatgggacttggtacccagggggcagagaagaagagtgcagcatctattgcctgtttcttggcagccaatggtgctgacctgagcattcgaaataagaagggtcaatcgccacttgatctctgtcctgatccgaatctctgcaaagcactggcaaagtgtcataaggaaaaagtcagtggtcaagtgggttctcggagtccttctatgattagtaatgattctgaaaccttagaagagtgtatggtgtgctcagatatgaagagagatactctttttggtccatgtggacatattgctacctgttctttatgttctccacgtgtcaagaaatgcctcatctgtaaagaacaggttcaatccaggacaaagattgaagaatgtgtggtatgctctgacaagaaagcagctgttctttttcaaccctgtggccacatgtgtgcttgtgagaactgtgctaacctgatgaaaaagtgtgtgcagtgtcgagcagtagttgaacgaagagtgcctttcattatgtgctgtggagggaaaagttcagaagatgccactgatgatatctcaagtgggaatattccagtattacaaaaggacaaggataataccaatgtcaatgcagatgtgcaaaagttgcagcaacagttacaagacattaaagagcagacaatgtgccctgtgtgtctagatcgtctgaagaatatgattttcctttgtggtcacggaacctgtcaactctgtggagaccgcatgagtgaatgtcctatctgtcgcaaggctattgaacgaaggattcttttgtattaactaagacacatggtgtattttgttagctaatgtatctagtcatgagatcttaataggcttttgatctagttggaagttctgatgagttaatttctaatatcatagtttctttactagagtataattgggctgtaaatgtaccagaacaaaaaaccctacaaaatggtgttggaaattgtgttttttgtttttgttttaaatttgaaacatcaaattcatgtaactcataggataatttacctttggcttctaagaggaaagtcctttaaggatatccttttttaaaaaattgcatttttctcttataatttgtaaatttgttggatctcaaaagacataattctttgtgatcagttatccttcatttcatcgtggttttacacagtgagttgataacaggttctctgagaagtcatgcatcaaataaaagaggcaggtcaaacaattatgtcacatggtaaattataaaatgacagtacaagttccagatagttaagggaataccgaagggatgattctttttttaagataacaggaagttacccacatgtttgtttctgaattcttagagtaaatggaagcatagaatgagggaataatgactttgcatttctcttgttttctagattcaaaaggaacattgtttaacttgaatcagattaccagtttcaaggtgactgatagacaagaaaaggaaaaataagcaataatagtgggcaactgaagagaaaaaaaaaacgagtatctattaactggccactaacagttgcctttcttacattaatttatacactattttgttcagccagtgtttttaaaaaaaatctatgaaaagtgtacttccggttttctgtgattacttatctgggcttgatctgaccagtgaaatgacattgccctatttggacctctgaggttctatttagctttgcagatgtacatagtatcccagtgatctgcaaaattaatgccttttccaagaaaaaatcttttcttctctgtatcagttaattctgacagtgttagtgattctgtcttcattataggccttatttccattatctctttctttatagtattttttgttataaagaaaacagtctttctgtgtatacctacggatgagggtattatttaaactgccaacaatatccaagacatggtcaataacctaattataaatactttagaaagagtgaccaggacatgtatagaaatgtctgcttacctgtagactttaaaaacaaacaaaatttttggagcatttaatcattttttttctccttttatctcctttgtaatcttattgtctcctgagtaaatatacacataaatgtttggggattcattgctgctagattatatcaggtgtttacatagtgtctactatatgctgttgataagctttttcctaaaaatagttatcctcttttgtagtttttttccctcctttaaatctggctagcttttcttacttcagtttttatagaacaccaactaaatttgaaagtatgaagtctctagccctcttacactgtttctggctgtttaatccttgctgcctttgcaagtcctggtgaaagcaatggggagctttgctggctggttttgtagtctcaacaattccatgtctgtgtttagctgagtaactgctatcatttagaacagtaaaatttttatagatttcaaatttgaaaattcatgtacactcagttatctaataaggggccaccgacgctgtttttaaaactattttgaagttataaaaaggtagaacatctgactgatgatgttcacataaagagacagacagactatcatgttgcagacatgaaaacagcatgtcaggtttttcctttccttccatgccatgggctacccatctcttcccactagatcacctggtgaggagggagcacctggctgactcatgcagagtttggccaatcagagaattgtgtggtctccagctctactttccttaaacaaatcctttctgttttctgagctgcagtgctaaaacagatccctaaaaggtaatagcatcttccagactagtttaattatttcctttataagaatatgacataaatttttattatagaaataatgtcattataattttagtgctagtacttgtgggttttctgtatttgtatcaccttgaaatttgttccatgaatagaaaatacttctttattcatgttttcaatcacttagaattattttaaatttattttgggtttgtgagagataataagattaagaacttcatcatttcagtgactttcctccaactctctgaatctgctacctcttattatatgtcccttagcagtacttttccagttaggttcgttaccctgctcattagctaaacctctttatcttgtgcctcaaaagagcttttacttttcttagaaacatttataaaaaagaaaaaaactgacacgcattcattcaaaaaagtatttattgggctttagggattagatacacaacagtggaaaaatggcatcttagcacactcagaatttattgtgcagcagttgtgtattttaaggaatctgtagttaaaaggaagagatccaaaggtcctgataacatttcctaacgtttcagaagagttgtcattgagtagtgtttggatttcctctctgtatccctcaccctaccattttctcctttattcttctaagattgttagcgttgttactcaaaacatacacatacaacataccagatggtgctgttctaatggtatttgttcacgtaatttaacgttcttactgcttatactatatacatatttaattttgttgggagcaagaaggttttcaagaaaagataattttgtattagtgtaggaatatattagacaaatgtttagttggtcaaattatgcataagatatttgtaactttaaacattgcaaattgaccagctagctatggaagcataaaattaattgataattaatgttggaaatacatttctaaaatttatatttttatggtgttagcctgtaagagcattttagcatattgaaatgcatgctgcttaagatgtgtctggttcaaatatcaaaacttgctgggtcatttttacatagtagaaacatactgtctatgtgttgcccaattgctgtttgtccactctgaattctggaccctttttggactaagaattagttaaattcatgaactaagagaattagagatggggtagagtaggatcaggacagtggggttacaacagataggaaaggaaagtcagcatttgagtgtagagaaaaaaagaggatcatacagatgtcatcaaattataggctttaatacaggttgctttttttaatccaaaaggaaaagcacttatcctatcagaatgtctaccatgttttatagtaataatttgtgtaaaaaattgaatttttgaatagttttttgtattttttgtgatgaaaaactcataacataaaatttaccatattaactgtttctaaagaatacagttcagccatgtgaagtacatttacactgttgtgaagcagatctccagaactttttcatcttgcaaaactgaaactccatacccattaaacaactcccctttttgttttctcctcagtggaatagaattttgactccatataaatcaagaaacacctaaattctttagttgtttgtgtttgcaagatctaaggtcatggtaaacattaagttcttaaaatttttgggagggacagtgcacctctcctctgaattgttagcaattaaattgagtaggttttaaatgtctattcattggaagggtttgttatttcattttgagccagaggggagaggcacattttaaatatcagaattagattagctttgagtttgtacaattgggaacataatagattttcataaattatgtgtgccttgttggaagtgtcaactgtctttatgtctgcttgtaaaagtttcaaaatatgttttccctcaaaaaggcaacgttacttcatttgcttgaatattatgataggaatgcttactgatattacttgatagtcatatatagcctaggaaatttaacatatatataactatagcagtattaataatgatagttgtacttctttaaaacattaaatttgaggaaactttaatgctgtctcgtgtacattgctttactacagtgagggggaatatcctttagattgagcctcaatttactggttagtagtatgtgaaactctggtataaaaacgtaaactagacagtagagccgatgaattaaaattgtaaattgctacattggcattttctacctccttttctgtcagagtattactttttccagcatttattcttatttgtgagtaaagaggaaatgggaacctgaggttaaaattgacatttttgtttcattgagaatttaagcagtaggtacaggagaagtgacttgtcacattaatttggtgcctaaatctgtaactacaagttgtgatcgacatgtacaaaatgtctaagaaaggtcatatgctgaatattttacttttcctgtatagtctgcatgatttgtttcataaacccagcttatttcctccaaaaagcaaaatggtcctgtaatttttaaagtaaaataaacgtgccattttgtctgcaatctataatttcaggaagttattgaaagttctgactcagggctttttaacagttcaagcaattgtcagttatattttggaaactccatctgtgtaattctccagtgccttgaaagaattattaacttggcaacactattaaaactttataaaagatggtctttagtgcacgtgtatcattatatacacgttttaaagtcatattgcttagcttgttaataatgattctgcatgtgtgctgggtttgggtaattctttaaaggaagttt

SEQ ID NO: 8349 - protein, 1006 aa, Homo sapiens; identical to SEQ ID NO: 1170

SEQ ID NO: 8350 - DNA, 8192 bp, Homo sapiens; identical to SEQ ID NO: 8348

SEQ ID NO: 8351 - protein, 1006 aa, Homo sapiens; identical to SEQ ID NO: 1170

SEQ ID NO: 8352 - DNA, 8192 bp, Homo sapiens; identical to SEQ ID NO: 8348

SEQ ID NO: 8353 - protein, 1006 aa, Homo sapiens; identical to SEQ ID NO: 1170

SEQ ID NO: 8354 - DNA, 4260 bp, Homo sapiens
atgagtaactcccggaataaccgggtgatggtggaaggggttggcgctcgggtagtgcgcggcccggactggaagtgggggaagcaggacggcggcgagggccatgtgggcaccgtccggagcttcgagagccccgaggaggtggtggtagtgtgggacaacggcacagctgccaactaccgctgctccggggcttacgacctccgcatcctggacagcgcgcccaccggcatcaagcatgatggaaccatgtgtgatacctgccgccagcaaccaatcattggcattcgatggaagtgtgcagagtgtacaaattatgatttgtgcacagtgtgttatcatggagataaacatcatttaagacatcgcttttaccgaattactacaccgggaagtgagagggttctgttagagtctcgtaggaaatctaagaagattacagccagaggaatctttgcaggtgccagagtggtgcgaggagtggactggcagtgggaagatcaagatggaggaaatggacgtaggggaaaggtaacagaaatccaggactggagtgcatcaagcccacatagcgcagcatatgtcctctgggataatggtgctaagaacctttacagagttggctttgagggcatgtctgatctgaaatgtgtccaggatgccaagggaggttctttctacagagatcactgccctgtgctaggtgagcagaatggcaacaggaatcctggtggattgcagattggtgacctggtaaatatagatctcgacctcgaaattgtacagtctttgcagcatggtcatggaggatggactgatggaatgtttgagactttaactacaactggaactgtttgtggcattgatgaagatcatgacattgtagtacagtatccaagtggcaataggtggaccttcaatcctgctgttctcactaaagcgaacattgtccgaagtggagatgctgctcagggtgcagaaggaggcacctcgcagtttcaagtgggtgatcttgtacaagtttgttatgacctggaacgaattaaacttctacaaagaggacatggagaatgggctgaagcgatgcttccaactttaggtaaagttggccgagtacaacagatttattcagacagtgatttaaaggtggaagtttgtggaacatcttggacatacaatccagcagcagtttccaaggtggcatctgcaggatcagccattagcaatgcatctggtgaaagactctcacaactcctgaagaaattatttgaaacccaagaatctggtgacctcaatgaagaattagttaaggctgctgccaatggagatgttgctaaagtggaagatttgcttaaaagaccagatgtggatgtaaatgggcaatgtgctggccacacagctatgcaagctgctagtcagaatggacatgttgacattttgaagttacttttgaagcaaaacgtggatgtcgaagcagaggataaagatggtgatagagcagttcaccatgcagcttttggagatgaaggcgctgttatagaagtactacatcgaggtagtgctgatttgaatgctcgaaacaagcgccgacagacaccacttcatattgctgtcaataaaggtcatcttcaagttgtgaagactttattggactttggctgtcatcccagtctccaggattctgaaggtgatacccctcttcatgatgcaataagtaagaaacgtgatgatatcctagcagttcttttggaagctggagcagatgttaccatcacaaacaataatggatttaatgctctgcatcatgctgcactaaggggaaatcccagtgcaatgcgtgttttactatctaaattaccaagaccatggattgtggatgagaagaaagatgatggttatactgccttacatctggctgcccttaataatcacgtagaagtggctgaactgttggtacatcagggtaatgcaaacctggatatccagaatgtgaaccaacaaactgccctacaccttgctgttgaacgacagcatacccagattgttaggcttttggtccgtgcaggtgccaagcttgatattcaggataaggatggggatactcctttgcatgaagctctaaggcatcacactttgtctcagctacgtcagctccaagatatgcaagatgtggggaaggtggatgctgcctgggagccatccaaaaacacgttaataatgggacttggtacccagggggcagagaagaagagtgcagcatctattgcctgtttcttggcagccaatggtgctgacctgagcattcgaaataagaagggtcaatcgccacttgatctctgtcctgatccgaatctctgcaaagcactggcaaagtgtcataaggaaaaagtcagtggtcaagtgggttctcggagtccttctatgattagtaatgattctgaaaccttagaagagtgtatggtgtgctcagatatgaagagagatactctttttggtccatgtggacatattgctacctgttctttatgttctccacgtgtcaagaaatgcctcatctgtaaagaacaggttcaatccaggacaaagattgaagaatgtgtggtatgctctgacaagaaagcagctgttctttttcaaccctgtggccacatgtgtgcttgtgagaactgtgctaacctgatgaaaaagtgtgtgcagtgtcgagcagtagttgaacgaagagtgcctttcattatgtgctgtggagggaaaagttcagaagatgccactgatgatatctcaagtgggaatattccagtattacaaaaggacaaggataataccaatgtcaatgcagatgtgcaaaagttgcagcaacagttacaagacattaaagagcagacaatgtgccctgtgtgtctagatcgtctgaagaatatgattttcctttgtggtcacggaacctgtcaactctgtggagaccgcatgagtgaatgtcctatctgtcgcaaggctattgaacgaaggattcttttgtattaactaagacacatggtgtattttgttagctaatgtatctagtcatgagatcttaataggcttttgatctagttggaagttctgatgagttaatttctaatatcatagtttctttactagagtataattgggctgtaaatgtaccagaacaaaaaaccctacaaaatggtgttggaaattgtgttttttgtttttgttttaaatttgaaacatcaaattcatgtaactcataggataatttacctttggcttctaagaggaaagtcctttaaggatatccttttttaaaaaattgcatttttctcttataatttgtaaatttgttggatctcaaaagacataattctttgtgatcagttatccttcatttcatcgtggttttacacagtgagttgataacaggttctctgagaagtcatgcatcaaataaaagaggcaggtcaaacaattatgtcacatggtaaattataaaatgacagtacaagttccagatagttaagggaataccgaagggatgattctttttttaagataacaggaagttacccacatgtttgtttctgaattcttagagtaaatggaagcatagaatgagggaataatgactttgcatttctcttgttttctagattcaaaaggaacattgtttaacttgaatcagattaccagtttcaaggtgactgatagacaagaaaaggaaaaataagcaataatagtgggcaactgaagagaaaaaaaaaacgagtatctattaactggccactaacagttgcctttcttacattaatttatacactattttgttcagccagtgtttttaaaaaaaatctatgaaaagtgtacttccggttttctgtgattacttatctgggcttgatctgaccagtgaaatgacattgccctatttggacctctgaggttctatttagctttgcagatgtacatagtatcccagtgatctgcaaaattaatgccttttccaagaaaaaatcttttcttctctgtatcagttaattctgacagtgttagtgattctgtcttcattataggccttatttccattatctctttctttatagtattttttgttataaagaaaacagtctttctgtgtatacctacggatgagggtattatttaaactgccaacaatatccaagacatggtcaataacctaattataaatactttagaaagagtgaccaggacatgtatagaaatgtctgcttacctgtagacttt

SEQ ID NO: 8355 - protein, 1006 aa, Homo sapiens; identical to SEQ ID NO: 1170

SEQ ID NO: 8356 - DNA, 662 bp, Homo sapiens
actgaggaagaatataagttagcctcgtagtgaccatgtggaagtcctgacctcgcttgcagacttgacctctggatgtgacaaggtgaggttctgtgttcactgatacatccccttccttcaccgggctcatgaaaagaaatgctgaatcagcaaatagagtgaacgaacaatcaagatgagatggctgctgttgatgtgattctctaggttactacctttcttcctgctgcaaatgctgcatgacactaagcttacaggatctagaagcagactacaaaaaaagaagaaattcactctgaagactgaagaaacactaggctgatcttaagtttccgaaatacactctgtaacactacactgattctttgaatctcttgcaaaaagaatcaaaccaggacaaagttcaacagataactggtcaaatgcttaggaatgtctatgtccaccaagaatatggaaccattaatgccatgcttcagttactatcatactatgagaaaacatcaagatcagctttgaaatctagactcatattgatctgcacctttgaaatagagacttcaaaggacagtcttcaaaaatataggacatctagacacttcatcaggttctggaaataacaacgtgctatatctggttttcttttcttttctttcttt

SEQ ID NO: 8357 - protein, 65 aa, Homo sapiens
MLRNVYVHQEYGTINAMLQLLSYYEKTSRSALKSRLILICTFEIETSKDSLQKYRTSRHFIRFWK

SEQ ID NO: 8358 - DNA, 4234 bp, Homo sapiens
actgaggaagaatataagttagcctcgtagtgaccatgtggaagtcctgacctcgcttgcagacttgacctctggatgtgacaaggtgaggttctgtgttcactgatacatccccttccttcaccgggctcatgaaaagaaatgctgaatcagcaaatagagtgaacgaacaatcaagatgagatggctgctgttgatgtgattctctaggttactacctttcttcctgctgcaaatgctgcatgacactaagcttacaggatctagaagcagactacaaaaaaagaagaaattcactctgaagactgaagaaacactaggctgatcttaagtttccgaaatacactctgtaacactacactgattctttgaatctcttgcaaaaagaatcaaaccaggacaaagttcaacagataactggtcaaatgcttaggaatgtctatgtccaccaagaatatggaaccattaatgccatgcttcaggtaaacttgttacaaaatttagtcttcgataaattagtctctgcaaatgatttaccattgctctacattagtaagctgaatgtttcactaacaaataagaaaataaaatatttcatgtttttacagctaacaacttagtaatacctactcagagtacatacttctttatgtacccatatgaacatacaatgctatggaatgtaaagaagtatgtatttttggtaggcaataaaccaccaagggagaattaaactgagctaaaagaagctcttgcttctttctacgtgaatgaccgtcatatggtaaattaacctagtcatgaacagatgacctttggcaatactaacaccaaaaaaaaaaggttatctactactgatagatagaaactatccctaaggtttttatttcatgaaggaaaagaagatccagtgaagtagatttcaattatcatgaaactccttttaaatcatctaagtttaaaacagacatcttacatttttaaattaggcactctcattattaaaatttgactgcaaaagggaaaatagtattactagcacaaaagaatgaggaatacacatgacctattttctgtctccacaatttaatcttaagtatatctcattagtagggctcactgatttgtacagaaaaataagatactaagagctggcttcattcacataataagctatttcttctcattttgataaatgtataattaatattagaggaatttctgaccaaaagttttgttgttttaaaaaggctttcttttttgacagctacaaacatagtggcccttgtccttccttctcaagtttatcagggtcttaacccaaatctctactttaaatgtgaagttaaaacttaaaattaattaaaatgtaagatttaagcatgaaaaatgacaaaattctggtccacagctgtaagtcagcagggtatattggtaacagactaccaaatatttaaaagaaattaatttatctgtattatcttcgaatttgctttctccaaagagggcatgtaaaatgaaagcactatagtcaagaaccaatttatacagatcgaagaactgtttttattgtactatgcaattacaattcaatttctctaaacttgatcaatccattgtttagaaatatcaaaatacttttatttcacacagtttgtatattatttataaaaaattccaaataatgctcttagcaaaatttataagcagtacctgttttaagctactaatgacaaagttagaaaataagagtaatattcacatattctaaccatttcttactaaaagtattatttcaactgaaatatttacacatgtataaaagcataatattttaaattttttgtatcagaaattgaatggaaatgactaagtttaactatagttcattttctgtttaataagactagttaatacaaagatgattttcattttatcagattataaagaatgagaatgacttacacatggcatcatatgtgttactgcatgtttactggaaattataaaaggcacataattttaaaattctacactttcaaagaaattagttcaaagcttaactcacataagcatagcccttctgatcatccacaaaacagaatggcaatgattcatgttctatttggtaagtttacctgtataggtcctaaataccaagaactcaaaatatatacctcaaaagtagaggttcttctataaaaatactcaaagcttattactctacttgtgttttataataaacagttatattggtcattctataggtatacaagttgtttaataatccttctcaaacatcctagcaactaagactctctttgctataatattaagactatataaataatccttagaaaataaaatgacaggctattcatttttaaaagtaaaattatatgctgattctggtgcttgcgagtttaacttatctaagagtattttcaatcactctaaaatgtcacatctatcacttagatcagctgttcatttttaactgagtacatattaaactctgggcatctgctgacactggtataactcaaacatttcaactgtctccctgacagggataacagatgctgacattatcaaatgctgtactatttttttcccatggcctctccttgccccgatatggccagtatatgaaactgaactgccatccaaaaacacacttgagcaactggatctgctaaacagctcccatataactagtaaaaatagaagccagtattattgctatcttcagcacttaagtttaggcagtttaacacctgtttcacttctactagaaaaaatgatgaaaaagaattgtagttaatttcaccagcagtatgatacttaccaaccaacagacgcagaatatacttagtgtaagagtcatttgcatactgcctgaattagcgttgacctctcagtttaaaatagtaactgtaaagaatatttctctactctatatttctctgagagcacttaactttataggcaaattataatttatcaaacttttattttatgcaagaagacacccctctcaagacattgaaatcaacagtaaaaccacattataacaaaaatttactctgatttttcaagtattatccacacaatagattttaatacttgtatccatggattgtaactaaccaccatgtattactaaggcgataatgagaagtaacttggcaatctgtacccaaaatgacaaagaacttagtcaaggaaatagacctttaaaagggttaaattactaagctatgattagtaacaccacgtaagcaaaaacaaagaaaaactggcatgcatggtagttcctttcgacacaagtccaagcaatacactgaatacacatgtgatctatttataaatcaaagggcagaggtactttcttaaggccactgatattcctacacccatcaacaatttgctattagccctcaactataatgctaaaagaagcagtggcagtagaagggggtgactaactgaactcttccccaaccttttagcttaactatttatctggtttgctgcctagagataaatggaaaacattactctaaaatacatcaaggtctatttgttcctttaaatactattggttttgaaatagcttattgtctacatgtaagaattaagcaaagacttcggctgtggacaagattagaaaaagaaaaagaagcaaagatgttgaaaacaaagacgtacattgatcattccttaatgcagtaatgtgttaaaaggaaaagatttttaaaccattaagcgcaggaaaacagtaggaaagtgacttcaaaatggaaaatttgacattcagtgactgaagcattggtatgataatttctaacacttgtagaaggtccatgactgtaattttaccaatgaaaagcatttaactgttttggattccaaactagcagcactacaatgctttgctagagctggtaaaatggaaccaaatcgcctcttcaatggatttggtccccttcaaccagctgtagctatgcattgattactacgggacaaccaacgttttcatttgtgaatatcaattacttgccaactaatttcaacttatttacattatgcagactgtgattataatcaaataacttgttactgttaattctacctggaaaagctagaatggttaaagatgtttataaaaagctttatgaaaaatgtatggatgacttaaggatttcaaataaaaattttacttattatggtc

SEQ ID NO: 8359 - protein, 83 aa, Homo sapiens [sequence omitted]

SEQ ID NO: 8360 - DNA, 778 bp, Homo sapiens
actgaggaagaatataagttagcctcgtagtgaccatgtggaagtcctgacctcgcttgcagacttgacctctggatgtgacaagaaatgctgaatcagcaaatagagtgaacgaacaatcaagatgagatggctgctgttgatgtgattctctaggttactacctttcttcctgctgcaaatgctgcatgacactaagcttacaggatctagaagcagactacaaaaaaagaagaaattcactctgaagactgaagaaacactaggctgatcttaagtttccgaaatacactctgtaacactacactgattctttgaatctcttgcaaaaagaatcaaaccaggacaaagttcaacagataactggtcaaatgcttaggaatgtctatgtccaccaagaatatggaaccattaatgccatgcttcaggtaaacttgttacaaaatttagtcttcgataaattagtctctgcaaatgatttaccattgctctacattagtaagctgaatgtttcactaacaaataagaaaataaaatatttcatgtttttacagctaacaacttagtaatacctactcagagtacatacttctttatgtacccatatgaacatacaatgctatggaatgtaaagaagtatgtatttttggtaggcaataaaccaccaagggagaattaaactgagctaaaagaagctcttgcttctttctacgtgaatgaccgtcatatggtaaattaacctagtcatgaacagatgacctttggcaatactaacacc

SEQ ID NO: 8361 - protein, 64 aa, Homo sapiens [sequence omitted]

SEQ ID NO: 8362 - DNA, 1250 bp, Homo sapiens
agtgcttaccccccctcaaaaaaaaaaaagtggggggcaggacaaatggctaagcagtgtttggaccgcaggatgaacaatcaataggcagaaagcaagattgaggcttcctcagcttttggatcgacaatcgacagctgagaggctattttttgctatggttgactaaatatggtcagggaagagagaggcacaagagagcctgtttgcctgggagtgcatgtttcaaatgcttagctgcctataaagctgtaacagtttagccagtggtcactgaggaagaatataagttagcctcgtagtgaccatgtggaagtcctgacctcgcttgcagacttgacctctggatgtgacaaggtagcttcactacagctctactatttaatcctggaaactaaaaaccaaaaaaaaaaaaaaaaaaaatctaaaagcaagaaagatgcagactatttcctaagaagtcagaagaacccaatgtattctggagggcaaagaaaaacagggtgaggttctgtgttcactgatacatccccttccttcaccgggctcatgaaaagaaatgctgaatcagcaaatagagtgaacgaacaatcaagatgagatggctgctgttgatgtgattctctaggttactacctttcttcctgctgcaaatgctgcatgacactaagcttacaggatctagaagcagactacaaaaaaagaagaaattcactctgaagactgaagaaacactaggctgatcttaagtttccgaaatacactctgtaacactacactgattctttgaatctcttgcaaaaagaatcaaaccaggacaaagttcaacagataactggtcaaatgcttaggaatgtctatgtccaccaagaatatggaaccattaatgccatgcttcaggtaaacttgttacaaaatttagtcttcgataaattagtctctgcaaatgatttaccattgctctacattagtaagctgaatgtttcactaacaaataagaaaataaaatatttcatgtttttacagctaacaacttagtaatacctactcagagtacatacttctttatgtacccatatgaacatacaatgctatggaatgtaaagaagtatgtatttttggtaggcaataaaccaccaagggagaattaaactgagctaaaagaagctcttgcttctttctacgtgaatgaccgtcatatggtaaattaacctagtcatgaacagatgacctttggcaatactaacacc

SEQ ID NO: 8363 - protein, 64 aa, Homo sapiens [sequence omitted]

SEQ ID NO: 8364 - DNA, 412 bp, Homo sapiens
tgaatataccacacagaaacaaagctccgtgtctgctgtgaaggctttggaggagacagaccatgaccagacacaggccctgtttctgatgctgagaagagaggaactaaataaatcctggttaacaagtgcatcagaaagctcctctaactgtaaatgcagagccctagcatgaagtggtacctgcagcctgaatgcatcgcatctgagttatgggcaaaggcagcactgcctgatggcctccttcccatgtcatctcctcaccgatgatctgttacaggtctggtcttccattttcaaataaggtctatcatttttttgtccttaataagataaaaatgaatttatcgagttttattataagggaaaaactatttgccaaatgattattcttcaataaataatttatctg

SEQ ID NO: 8365 - protein, 39 aa, Homo sapiens
MICYRSGLPFSNKVYHFFVLNKIKMNLSSFIIREKLFAK

SEQ ID NO: 8366 - DNA, 394 bp, Homo sapiens
gtctcacctcgttacccaggctggagtgcagtggtgtgatcatatctcactgtacatctccaactcctgggctcaagaaattctcctgccatagcctcctgagtaggtaggactacaggcatgtgccaccacacccagtagcatctcttcctcaaagatgagccagccgtcatttgaagaggaggaaagactggattggggaagaatctggggcaaaatgaagccaaattgagaacgaggagaaaagaagatgctaaggccgcagataaggaggtcttgagtgttacagctctttttgaatttgtctagcatgctttctgctttttactggaaagtgcccccccccaaaaaaataaaaacgaataaataaaaaagaaagatttaaaaaataaaa

SEQ ID NO: 8367 - protein, 43 aa, Homo sapiens
RGGKTGLGKNLGQNEAKLRTRRKEDAKAADKEVLSVTALFEFV

SEQ ID NO: 8368 - DNA, 346 bp, Homo sapiens
ttgtagagatggggtttcgccatgttgtccaagctggtctcgaattcttgggctcaaaccatctgcccacactggcctcccaaggtgctgtagcatctcttcctcaaagatgagccagccgtcatttgaagaggaggaaagactggattggggaagaatctggggcaaaatgaagccaaattgagaacgaggagaaaagaagatgctaaggccgcagataaggaggtcttgagtgttacagctctttttgaatttgtctagcatgctttctgctttttactggaaagtgcccccccccaaaaaaataaaaacgaataaataaaaaagaaagatttaaaaaataaaa

SEQ ID NO: 8369 - protein, 34 aa, Homo sapiens
MGFRHVVQAGLEFLGSNHLPTLASQGAVASLPQR

SEQ ID NO: 8370 - DNA, 459 bp, Homo sapiens
ttctgaacaacctctgacccagccacttttgaagatgccaaagagatgagaatctgtctatgttgcccaggctggtctccaactcctgacttcaagcaatcctcctgcctcagcctcccaaagtgctgggattacaggcatgagccacagtgcccagccccactcccattttctgaatctttcagaatttcagattgccttaaactgcccaaaaaagctgctataaaacctcaacatatcgctgctgcacaaaaccacccaaaccatcttcagacctctgccctctggcatgtgagtggcctgcatttcaggaggtgaaagatcagacctttgttatttgttaaagcactcagcaacccagaactaaacatgcacgccgatgttgatttgagaactaaaggatatctttcaagtccaataaatgtgataaaaataaacaacatcctttcataaatttca

SEQ ID NO: 8371 - protein, 90 aa, Homo sapiens
MRICLCCPGWSPTPDFKQSSCLSLPKCWDYRHEPQCPAPLPFSESFRISDCLKLPKKAAIKPQHIAAAQNHPNHLQTSALWHVSGLHFRR

SEQ ID NO: 8372 - DNA, 1519 bp, Homo sapiens
agctcattcctttgattctagtctaccagttgccacttctggtccatttgcatataacactggagaagtgttcctttatctttgtgaagcccttaacattcaaggagccactactgcttctatgctgctgaaaaatacaagacactgcctctacctctgcatctgtcctttgctttttgcttggaaactatcacatcaaatcacactgagatcaggagatgagatgaaggatcagctgaggaacagtcatcccaacagtagtgcctggtaagacggtgaggctattcccactcccagcatcctctgttctcttctggaccaacccagttattcaatccctgagctttctcatgtggttctggtaaatccactttttgcttagttcctactgagctctcactggcaaactatcagtagaagaagcctggacaaaactgagttcaatgcttcacaattgctgcgctcttcttctccccagtggaaaaaaaaatgctctctgcaccacatggccgctggccgctgccagaggatggaggaaggggtgatgttggtcattcaagactgtttttcctacctcttcagtgcctctttcaactgtatgaagttaaaaccagcttggcaggctctagagagactgacctctgcagatggtttaaagggagaagctcaagggtccacagttcacagggctgccaatcaggcctgtgcagaaaactcaacagtctaaaagaatatatgaagacagaacctcaacctagaagaaatggacaaattcccagacacatcaaggaattcctagacaaactatcaaaactgaatcatgattagatagaaaatctgaacagatcaatataagtaaagagattaaagcagtaataaactctcccatcaaagaaaagctcaggacctgatggcttcactgctgaattctaccaaacgtttaaagaactaacaccaatgattctcaaactctttttaaaaattgaagatgagagaacacttccaaattcatatcacgaggccagcattaccctgataccaacgccagacaaagacactataagaaaaggcaattatggaccaatatccctgataaacatggatgtaaaaatcctcatcaaaatactagcaaatgaaattcaaccacaaatttaaaaaagcattcaccatgatcgagtgggatttatccctgggatgcaggaagtttcaacatacacaaatccataaacatgatacaccacatcaacaagatgaaggacaaaatctttataatctcaatagatgcaggaaaagcatttaacagaattcagcaccctttcatgatttaaaaaaactcaacaaaatatagaaggactgtaccccaacacaataaagaccagatatgacaaacccacagctaacattctcaacagtgaaaagttaaaagcttttcttctgagatcaggaacaagacaataatgctcactctctcgacttctgttcatcgtaacgttggaagttctagacagagcaattagac

SEQ ID NO: 8373 - protein, 112 aa, Homo sapiens
MLSAPHGRWPLPEDGGRGDVGHSRLFFLPLQCLFQLYEVKTSLAGSRETDLCRWFKGRSSRVHSSQGCQSGLCRKLNSLKEYMKTEPQPRRNGQIPRHIKEFLDKLSKLNHD

SEQ ID NO: 8374 - DNA, 1352 bp, Homo sapiens
agctcattcctttgattctagtctaccagttgccacttctggtccatttgcatataacactggagaagtgttcctttatctttgtgaagcccttaacattcaaggagccactactgcttctatgctgctgaaaaatacaagacactgcctctacctctgcatctgtcctttgctttttgcttggaaactatcacatcaaatcacactgagatcagttcctactgagctctcactggcaaactatcagtagaagaagcctggacaaaactgagttcaatgcttcacaattgctgcgctcttcttctccccagtggaaaaaaaaatgctctctgcaccacatggccgctggccgctgccagaggatggaggaaggggtgatgttggtcattcaagactgtttttcctacctcttcagtgcctctttcaactgtatgaagttaaaaccagcttggcaggctctagagagactgacctctgcagatggtttaaagggagaagctcaagggtccacagttcacagggctgccaatcaggcctgtgcagaaaactcaacagtctaaaagaatatatgaagacagaacctcaacctagaagaaatggacaaattcccagacacatcaaggaattcctagacaaactatcaaaactgaatcatgattagatagaaaatctgaacagatcaatataagtaaagagattaaagcagtaataaactctcccatcaaagaaaagctcaggacctgatggcttcactgctgaattctaccaaacgtttaaagaactaacaccaatgattctcaaactctttttaaaaattgaagatgagagaacacttccaaattcatatcacgaggccagcattaccctgataccaacgccagacaaagacactataagaaaaggcaattatggaccaatatccctgataaacatggatgtaaaaatcctcatcaaaatactagcaaatgaaattcaaccacaaatttaaaaaagcattcaccatgatcgagtgggatttatccctgggatgcaggaagtttcaacatacacaaatccataaacatgatacaccacatcaacaagatgaaggacaaaatctttataatctcaatagatgcaggaaaagcatttaacagaattcagcaccctttcatgatttaaaaaaactcaacaaaatatagaaggactgtaccccaacacaataaagaccagatatgacaaacccacagctaacattctcaacagtgaaaagttaaaagcttttcttctgagatcaggaacaagacaataatgctcactctctcgacttctgttcatcgtaacgttggaagttctagacagagcaattagac

SEQ ID NO: 8375 - protein, 112 aa, Homo sapiens; identical to SEQ ID NO: 8373

SEQ ID NO: 8376 - DNA, 786 bp, Homo sapiens
cctctactactgtgcataaaacttgaagagttggaggccatgttcaccagcccagaagatatacgtacacttgggatttttgagttgtgtggtggacggaggggttagtcttaaacactactgatgaacctatgtgattgctgcctgtttcccgccaaataacagggcagtcacggcttatcctttctggctccccttttaccaccttctcctggaatttacctgacctcctcttctcacagcttggcaggctctagagagactgacctctgcagatggtttaaagggagaagctcaagggtccacagttcacagggctgccaatcaggcctgtgcagaaaactcaacagtctaaaagaatatatgaagacagaacctcaacctagaagaaatggacaaattcccagacacatcaaggaattcctagacaaactatcaaaactgaatcatgattagatagaaaatctgaacagatcaatataagtaaagagattaaagcagtaataaactctcccatcaaagaaaagctcaggacctgatggcttcactgctgaattctaccaaacgtttaaagaactaacaccaatgattctcaaactctttttaaaaattgaagatgagagaacacttccaaattcatatcacgaggccagcattaccctgataccaacgccagacaaagacactataagaaaaggcaattatggaccaatatccctgataaacatggatgtaaaaatcctcatcaaaatactagcaaatgaaattcaaccacaaatttaaaaa

SEQ ID NO: 8377 - protein, 65 aa, Homo sapiens [sequence omitted]

SEQ ID NO: 8378 - DNA, 438 bp, Homo sapiens
tgcagattccagacttgctggcctccatagtaatgtgtcaacaattttggcattgcagaagaccatggagacaacttttttatttctccatcacacaaggactgaagatacaaaaatgagtttttctttcctatggccttggactagctatatacgatagtaattagcaagcaggctctgaattacacgagcccctcccactgactcttgtactttttagctataagaacctaagcacgaacttcgcagagctccagtgcttctgttttgaaaagagataatatttcctatgggatagggttgtctgggggtactaaatgagaactacatacaaagtacttaatggaaggtatgtaggactcaatagaggtagctattaaattgtatgtaagtaacaaatcctgataatgttcaattctgaataaaacttagcaaggt

SEQ ID NO: 8379 - protein, 31 aa, Homo sapiens
METTFLFLHHTRTEDTKMSFSFLWPWTSYIR

SEQ ID NO: 8380 - DNA, 506 bp, Homo sapiens
gaaatgatcatccctggaggcttcagagggagcacaacactggcaatgccttgctttcctgctgttgaacatgagattccttgttcttcagttttgggactcaggctttccttacttctcaactggcagacagcctattttgggacctagtgattgttctttcagtttcacatggctggggaagcctcacgatcatggaaaaaggcaaggaggagcaaatcatgtcttgcatggatgtcaacagtcaaagagagcttgtgcagagaaattccaccttataaaaccatcggacctcatgagacttattcaccatcacaagaacagcatggaaacagctgttccttaagtttaagacagaaacttggtctgaaaagtgacacacgctctgtttctgcagatgtctccaaaaacagaagttgttgcacctgacagtgaatattaaaggtttggcctgctttatctctcgctttcacaatgaatcatatctcaataaattctgtctcacc

SEQ ID NO: 8381 - protein, 91 aa, Homo sapiens [sequence omitted]

SEQ ID NO: 8382 - DNA, 656 bp, Homo sapiens
cctttcttcacctctcagccccattccagccttctcgggatggacagctctgctgggtgagaagaaagctcaggctggcggggatggcaaaggagctgctctcggacccccaatcctgtgtatgggtaacgggaatggcaggactgtggttgagctttgggagcccgggaaggaaggatactggagctgggctgatccaggacagcttcctggaggaggcgggatttaaactggtcaatgagaatttgccatttgcttcaattgggcacctgaaggcatcagtaatctggtttcacctcggaccacattcaggctccacgaaacccttctgggtgtgaggtacagagctcagcacgctgctggtccttaaaaaaagaaccacatgagggcaataatcacgagaggactgtggtgctatgtgaagaagaaatgaaactcatccatgataatggagatgaaaatcctagttcttaggacggcctcaaactttagaaaacctcacacggactcagggagaagagaggggctaggtgggtgtgcagagtcccccagtggcttgttttcattggaataataacatcttacatttcgatgtggtaatgtcgctgttaaaacgcacttctcattgttagaaataaaaatgactcaaagatgtg

SEQ ID NO: 8383 - protein, 84 aa, Homo sapiens
MAKELLSDPQSCVWVTGMAGLWLSFGSPGRKDTGAGLIQDSFLEEAGFKLVNENLPFASIGHLKASVIWFHLGPHSGSTKPFWV

SEQ ID NO: 8384 - DNA, 413 bp, Homo sapiens
aaggatactggagctgggctgatccaggacagcttcctggaggaggcgggatttaaactggtcaatgaggctccacgaaacccttctgggtgtgaggtacagagctcagcacgctgctggtccttaaaaaaagaaccacatgagggcaataatcacgagaggactgtggtgctatgtgaagaagaaatgaaactcatccatgataatggagatgaaaatcctagttcttaggacggcctcaaactttagaaaacctcacacggactcagggagaagagaggggctaggtgggtgtgcagagtcccccagtggcttgttttcattggaataataacatcttacatttcgatgtggtaatgtcgctgttaaaacgcacttctcattgttagaaataaaaatgactcaaagatgtg

SEQ ID NO: 8385 - protein, 43 aa, Homo sapiens
MIMEMKILVLRTASNFRKPHTDSGRREGLGGCAESPSGLFSLE

SEQ ID NO: 8386 - DNA, 3792 bp, Homo sapiens
gtctaagaattcctgttagttttatgctttgatagaagatgataatgcaaaagtaccagttattaaggaaagtaaagagtccatgggggctgaggggtatctcatgggagaatgccatccctgctgtcatctcagctctcaaagaaactatctggaactcaagcagggcctttatccattcctcttaacagttattcctgcaagcagtcttaaggattataacattcagtagaaatcgttctctgtatgaaggcaactttataggctagctgtttacttacttctgaaaagctttttctaaccatgttattcatgaatttgtccaaattcatttctatttcttcccagtagtatttttggaggtaaaatactgagtttaagactcattatgcttgtgggtaaaggtttcacaaaactctttccccttttacatgagaaattggccttgggttaagatgcttctagctcagttctctagaaatctaatggaggtagaatgtcagttgtgttaccaagcaacactgctatgataaaatgatgatgtgataaaatgacatttgattggtaagctgagtcattacttggaggactacgaatgaactacaaatacttgatgagaagccatcactttgggcttctccgaatgagagaattcttataactgggcatgtcctttacaaggacgtagaagctgagactgtcacaaggatattggtttctatttgagacatggtttctaaggacacacagaaccatgcaaagaatttaaactacatccatttgaaacacattctcctttggaagaagtgaaaagcagagtggaggtgaggaagtagaaaggacctcactgtgatctccttctttagctcaaggttgctgcaagctggagctgagctgtcagtggaacgggtcctggaaatcattaagcaaggcgtcgttgcgctgcccaaagacagactgaagccgctggccgatcgtcaggtggacagagtccttgcatgccaggcctttgtgtatgcagcttctgggttctcacagtttcatggcttgtctgtcagaaatttccagaattgaaattcaaatatgtggaagaggagcagcccgaggagttttttatcccctatgtctggtctcttgtctacaactcagcagtcggcctgtactggaatccacaggacatccagctgttcaccatggattccgactgagggcaggatgctctcccacccggacccctccagccaagcagcccttcaagttcttttatttctgggtaacagaagtagacagacaggttacttggtgtatcttctgttaaagaggattgcacgagtgtgttttcctcacacactttgatttggagaattggtgctagttggcaatagataactcagcgtagatagtattgcaaaaaggggaggaaatacacaacaataataaatgtaaaaacctgctattcaacatgcagttttatttcgaagccaaaaatctagagctttcccaagatcctgttgccttaggcacatcacacttcaacagtgcacactatccaacagtgcacactattcaacagtgcacactattcaaaagcgtagactatttttttgcatgttcaagatatttgttttggtcttatgtgtgtgtgagagagagagattcctttgacattaaggagcatcaatgagaaaagatgatgaggcaggaattaataaagaaatgaagtcgtgtgtgtttggttgcctgtcagagggcacacaatttcataaacaccatgcctggacaatttgatattaatatttaacacctctgcatcttttcttaaaaaagaatatgggccagatacagtggctcacatttgtaatcccagcactttggggagccaagttagcagaatcccttgagcacaggaatctgaaaccagcttgggcaacatagtgagatcccatctctacaaaaaacttaaaaattagccaggcatgatggcacattcctgtagtcctagctactcaggaggctaaggtaggaggattgcctgagcccaggagttcaaggctgcagtgagctaagaacgtgccagtacactccagcctgagccacaaagtgagaccctgtctcgcaaaaaaaaaaaaagaaagaaaagaaaaagaaaatggctacttctcatgaagcccagattaacttttctgtgaatatggcctgtgaactgttgctggaattaaattggagtctagcacaaattaagttaatctactctgtattaatcattgggaaaaagaaaagcttcatttgaaaacagtctttttccttcacccacactaatagaaaaaggagagtaatttgttcatactgtattccacgtgggatgaaaagcatgttttgctctttgtttctgggccggtgtgatccgtgtgttggtgcctgagctggaggaaggagcttcttgcagggaaacagccactggggccacattgagggccagttgggaccttcctttccagtcacactctgtgtcctcacgggccccttcacagtctagataaggagcctagtttcattctcaaagaaaaagtatttggtcttcaacatagaaagcacaaaagcccagacgagactgagcacactgttcgaatccactgccagctcatctgtgtcagggctggcttctcctgtcctgtgtcccagggctgcaggcccgtgttatttgagtccatcaaatcttccgagggcctcggaggaaccattctcagtcaccccaagctctgtaaaaggtcaaaacactggcagcctctcagtgcaccactgtgtgggctccacacgggaaggcctggccaagctgtgctcttagaggctgtcgaggtagggcaggaagcttccctatcctcgtctggatggaatgaaacagaggttccctaaggccaagggactcgtggagcgcccatcccgggtggggtcccagaggtgagtgcagcttgcctcctgtccccaaggggcttgttctgtcaggcctcctccagtcactgctggagtggggactctgactcctgtgttcacctcagagcccatgtacaggctagaggtgaggcttggcaacaacttctactaatacttagctttgtggcagagccagtctgaaggaggagaagcgctctcagccagcagggggagtgatgattatcatttcaggtagcaaggatatgtatttactatgtggggaaataatttgcaactttaatttgtttccaaagcattttgattggcttccttttcctttaaaccaaaaaattgtttaaatgtttaagggtcatgtggaacagctgagcttctggcaggaccacagaactgtcctctgagtctgagggctgggcagtgccacaggacagtccctgggctgcaggactgtcagtgcttgttgtgtgaggaaatgaggcccttcaaaaacccagtcatcttgacagagggcacactcccaaggaaggcctgactggggaatcatacagcctctcctccaggcctctgggctcactgaggtgcccccagaaccctgattgccctcccctctttcccttttctcattcatcacacagtagaagcactcactagctaacagctcagctggggcagcagcctccatggaggcctgcaagtgatgctcccagtcctggttcccgctcaggagggaggccccaccacgtgcatcactgcctcagctctgcaaagtcaccagaggcttcttcctgatttttgtgaaagatttattatatggcaataaatctgaatgataaactttcatta

SEQ ID NO: 8387 - protein, 100 aa, Homo sapiens
MQLLGSHSFMACLSEISRIEIQICGRGAARGVFYPLCLVSCLQLSSRPVLESTGHPAVHHGFRLRAGCSPTRTPPAKQPFKFFYFWVTEVDRQVTWCIFC

SEQ ID NO: 8388 - DNA, 4960 bp, Homo sapiens
cacgtgaccacctggctggcgcgcgcgcctgggggtctggtccctagccgcgttctcggtcgcttccctcttctctcgccgcctcctggcctccgcaccgacgcggcccgggctggagccgagccggggccgagctgcaggccggaccggagccggatctgtacccgctgagacgtggaaacatggaggcctgagccggtgtgcgccacctgggctgcggcggcgacagcgacttctcctgacccctctgccaccctcccatccgtccgcgggtccgtggagctggagcagatcccccagccggctgagacaggttgtcttttggaaatgcaggtttaaggacaaattatctgcttaagctagaagatgggatcgaatagcagcagaatcggcgatcttcctaaaaatgagtacttgaaaaagttatcaggcacggaatctatctctgagaatgacccgttctggaatcagcttctctcattttctttccctgcaccaactagcagtagtgagttgaaactcttggaggaagcaaccatttcagtctgcaggtcattagttgaaaacaatcctcgaacaggaaatcttggtgcactaattaaggtcttcctttctagaaccaaagaactaaaactttcagcagaatgtcagaaccacatcttcatttggcagacacacaatgctttgtttattatttgctgtttgctgaaagtgttcatctgtcagatgtcagaggaggaattacaacttcattttacttatgaagaaaaatctcctggcaattacagttctgactcagaagatcttttggaagaattgctgtgctgtttgatgcagttgatcactgatattccactcttagatattacatatgaaatatcagtagaagctatatcaacaatggttgttttcctttcctgccaactcttccacaaagaagttttgcgacagagcatcagccacaagtatttgatgcgaggtccatgtcttccatacaccagcaaacttgtgaagaccttattatataactttatcagacaagaaaagccacctcctccaggggcccatgttttccctcagcagtcggatgggggaggactgctttatggacttgcatcaggagtagcaacaggactctggactgtcttcacactaggtggtgtgggcagcaaagcggctgcctctccagagctttcttcccctctggccaaccagagtctcctgcttctgctggtgttggccaatctgacagatgcctcagatgcgccaaacccctacagacaagccattatgtccttcaagaacacacaagatagcagtcctttcccctcatcaattccacatgccttccagatcaactttaatagtttgtacacagctctttgtgaacagcagacatctgatcaagcaactctcctcttgtataccttgctccatcaaaatagtaatattagaacatacatgttggctcgcacagatatggaaaatcttgttttaccaattcttgagattctgtatcatgttgaagaaaggaattcacaccatgtgtatatggcccttataatattgttgatccttacggaagatgatggcttcaacagatccattcatgaagtgatactaaaaaatattacttggtattcagaacgagttttaactgaaatctccttggggagtctcctgatcctggtggtaataagaaccattcaatacaacatgactaggacacgagacaagtaccttcacacaaattgtttggcagctttagcaaatatgtcggcacagtttcgttctctccatcagtatgctgcccagaggatcatcagtttattttctttgctgtctaaaaaacacaacaaagttctggaacaagccacacagtccttgagaggttcgctgagttctaatgatgttcctctaccagattatgcacaagacctaaatgtcattgaagaagtgattcgaatgatgttagagatcatcaactcctgcctgacaaattcccttcaccacaacccaaacttggtatacgccctgctttacaaacgcgatctctttgaacaatttcgaactcatccttcatttcaggatataatgcaaaatattgatctggtgatctccttctttagctcaaggttgctgcaagctggagctgagctgtcagtggaacgggtcctggaaatcattaagcaaggcgtcgttgcgctgcccaaagacagactgaagaaatttccagaattgaaattcaaatatgtggaagaggagcagcccgaggagttttttatcccctatgtctggtctcttgtctacaactcagcagtcggcctgtactggaatccacaggacatccagctgttcaccatggattccgactgagggcaggatgctctcccacccggacccctccagccaagcagcccttcaagttcttttatttctgggtaacagaagtagacagacaggttacttggtgtatcttctgttaaagaggattgcacgagtgtgttttcctcacacactttgatttggagaattggtgctagttggcaatagataactcagcgtagatagtattgcaaaaaggggaggaaatacacaacaataataaatgtaaaaacctgctattcaacatgcagttttatttcgaagccaaaaatctagagctttcccaagatcctgttgccttaggcacatcacacttcaacagtgcacactatccaacagtgcacactattcaacagtgcacactattcaaaagcgtagactatttttttgcatgttcaagatatttgttttggtcttatgtgtgtgtgagagagagagattcctttgacattaaggagcatcaatgagaaaagatgatgaggcaggaattaataaagaaatgaagtcgtgtgtgtttggttgcctgtcagagggcacacaatttcataaacaccatgcctggacaatttgatattaatatttaacacctctgcatcttttcttaaaaaagaatatgggccagatacagtggctcacatttgtaatcccagcactttggggagccaagttagcagaatcccttgagcacaggaatctgaaaccagcttgggcaacatagtgagatcccatctctacaaaaaacttaaaaattagccaggcatgatggcacattcctgtagtcctagctactcaggaggctaaggtaggaggattgcctgagcccaggagttcaaggctgcagtgagctaagaacgtgccagtacactccagcctgagccacaaagtgagaccctgtctcgcaaaaaaaaaaaaagaaagaaaagaaaaagaaaatggctacttctcatgaagcccagattaacttttctgtgaatatggcctgtgaactgttgctggaattaaattggagtctagcacaaattaagttaatctactctgtattaatcattgggaaaaagaaaagcttcatttgaaaacagtctttttccttcacccacactaatagaaaaaggagagtaatttgttcatactgtattccacgtgggatgaaaagcatgttttgctctttgtttctgggccggtgtgatccgtgtgttggtgcctgagctggaggaaggagcttcttgcagggaaacagccactggggccacattgagggccagttgggaccttcctttccagtcacactctgtgtcctcacgggccccttcacagtctagataaggagcctagtttcattctcaaagaaaaagtatttggtcttcaacatagaaagcacaaaagcccagacgagactgagcacactgttcgaatccactgccagctcatctgtgtcagggctggcttctcctgtcctgtgtcccagggctgcaggcccgtgttatttgagtccatcaaatcttccgagggcctcggaggaaccattctcagtcaccccaagctctgtaaaaggtcaaaacactggcagcctctcagtgcaccactgtgtgggctccacacgggaaggcctggccaagctgtgctcttagaggctgtcgaggtagggcaggaagcttccctatcctcgtctggatggaatgaaacagaggttccctaaggccaagggactcgtggagcgcccatcccgggtggggtcccagaggtgagtgcagcttgcctcctgtccccaaggggcttgttctgtcaggcctcctccagtcactgctggagtggggactctgactcctgtgttcacctcagagcccatgtacaggctagaggtgaggcttggcaacaacttctactaatacttagctttgtggcagagccagtctgaaggaggagaagcgctctcagccagcagggggagtgatgattatcatttcaggtagcaaggatatgtatttactatgtggggaaataatttgcaactttaatttgtttccaaagcattttgattggcttccttttcctttaaaccaaaaaattgtttaaatgtttaagggtcatgtggaacagctgagcttctggcaggaccacagaactgtcctctgagtctgagggctgggcagtgccacaggacagtccctgggctgcaggactgtcagtgcttgttgtgtgaggaaatgaggcccttcaaaaacccagtcatcttgacagagggcacactcccaaggaaggcctgactggggaatcatacagcctctcctccaggcctctgggctcactgaggtgcccccagaaccctgattgccctcccctctttcccttttctcattcatcacacagtagaagcactcactagctaacagctcagctggggcagcagcctccatggaggcctgcaagtgatgctcccagtcctggttcccgctcaggagggaggccccaccacgtgcatcactgcctcagctctgcaaagtcaccagaggcttcttcctgatttttgtgaaagatttattatatggcaataaatctgaatgataaactttcatta

SEQ ID NO: 8389 - protein, 669 aa, Homo sapiens
MGSNSSRIGDLPKNEYLKKLSGTESISENDPFWNQLLSFSFPAPTSSSELKLLEEATISVCRSLVENNPRTGNLGALIKVFLSRTKELKLSAECQNHIFIWQTHNALFIICCLLKVFICQMSEEELQLHFTYEEKSPGNYSSDSEDLLEELLCCLMQLITDIPLLDITYEISVEAISTMVVFLSCQLFHKEVLRQSISHKYLMRGPCLPYTSKLVKTLLYNFIRQEKPPPPGAHVFPQQSDGGGLLYGLASGVATGLWTVFTLGGVGSKAAASPELSSPLANQSLLLLLVLANLTDASDAPNPYRQAIMSFKNTQDSSPFPSSIPHAFQINFNSLYTALCEQQTSDQATLLLYTLLHQNSNIRTYMLARTDMENLVLPILEILYHVEERNSHHVYMALIILLILTEDDGFNRSIHEVILKNITWYSERVLTEISLGSLLILVVIRTIQYNMTRTRDKYLHTNCLAALANMSAQFRSLHQYAAQRIISLFSLLSKKHNKVLEQATQSLRGSLSSNDVPLPDYAQDLNVIEEVIRMMLEIINSCLTNSLHHNPNLVYALLYKRDLFEQFRTHPSFQDIMQNIDLVISFFSSRLLQAGAELSVERVLEIIKQGVVALPKDRLKKFPELKFKYVEEEQPEEFFIPYVWSLVYNSAVGLYWNPQDIQLFTMDSD

SEQ ID NO: 8390 - DNA, 1459 bp, Homo sapiens
gtctaagaattcctgttagttttatgctttgatagaagatgataatgcaaaagtaccagttattaaggaaagtaaagagtccatgggggctgaggggtatctcatgggagaatgccatccctgctgtcatctcagctctcaaagaaactatctggaactcaagcagggcctttatccattcctcttaacagttattcctgcaagcagtcttaaggattataacattcagtagaaatcgttctctgtatgaaggcaactttataggctagctgtttacttacttctgaaaagctttttctaaccatgttattcatgaatttgtccaaattcatttctatttcttcccagtagtatttttggaggtaaaatactgagtttaagactcattatgcttgtgggtaaaggtttcacaaaactctttccccttttacatgagaaattggccttgggttaagatgcttctagctcagttctctagaaatctaatggaggtagaatgtcagttgtgttaccaagcaacactgctatgataaaatgatgatgtgataaaatgacatttgattggtaagctgagtcattacttggaggactacgaatgaactacaaatacttgatgagaagccatcactttgggcttctccgaatgagagaattcttataactgggcatgtcctttacaaggacgtagaagctgagactgtcacaaggatattggtttctatttgagacatggtttctaaggacacacagaaccatgcaaagaatttaaactacatccatttgaaacacattctcctttggaagaagtgaaaagcagagtggaggtgaggaagtagaaaggacctcactgtgatctccttctttagctcaaggttgctgcaagctggagctgagctgtcagtggaacgggtcctggaaatcattaagcaaggcgtcgttgcgctgcccaaagacagactgaagccgctggccgatcgtcaggtggacagagtccttgcatgccaggcctttgtgtatgcagcttctgggttctcacagtttcatggcttgtctgtcagaaatttccagaattgaaattcaaatatgtggaagaggagcagcccgaggagttttttatcccctatgtctggtctcttgtctacaactcagcagtcggcctgtactggaatccacaggacatccagctgttcaccatggattccgactgagggcaggatgctctcccacccggacccctccagccaagcagcccttcaagttcttttatttctgggtaacagaagtagacagacaggttacttggtgtatcttctgttaaagaggattgcacgagtgtgttttcctcacacactttgatttggagaattggtgctagttggcaatagataactcagcgtagatagtattgcaaaaaggggaggaaatacacaacaataataaatgtaaaaacctgctattc

SEQ ID NO: 8391 - protein, 100 aa, Homo sapiens; identical to SEQ ID NO: 8387

SEQ ID NO: 8392 - DNA, 2627 bp, Homo sapiens
cacgtgaccacctggctggcgcgcgcgcctgggggtctggtccctagccgcgttctcggtcgcttccctcttctctcgccgcctcctggcctccgcaccgacgcggcccgggctggagccgagccggggccgagctgcaggccggaccggagccggatctgtacccgctgagacgtggaaacatggaggcctgagccggtgtgcgccacctgggctgcggcggcgacagcgacttctcctgacccctctgccaccctcccatccgtccgcgggtccgtggagctggagcagatcccccagccggctgagacaggttgtcttttggaaatgcaggtttaaggacaaattatctgcttaagctagaagatgggatcgaatagcagcagaatcggcgatcttcctaaaaatgagtacttgaaaaagttatcaggcacggaatctatctctgagaatgacccgttctggaatcagcttctctcattttctttccctgcaccaactagcagtagtgagttgaaactcttggaggaagcaaccatttcagtctgcaggtcattagttgaaaacaatcctcgaacaggaaatcttggtgcactaattaaggtcttcctttctagaaccaaagaactaaaactttcagcagaatgtcagaaccacatcttcatttggcagacacacaatgctttgtttattatttgctgtttgctgaaagtgttcatctgtcagatgtcagaggaggaattacaacttcattttacttatgaagaaaaatctcctggcaattacagttctgactcagaagatcttttggaagaattgctgtgctgtttgatgcagttgatcactgatattccactcttagatattacatatgaaatatcagtagaagctatatcaacaatggttgttttcctttcctgccaactcttccacaaagaagttttgcgacagagcatcagccacaagtatttgatgcgaggtccatgtcttccatacaccagcaaacttgtgaagaccttattatataactttatcagacaagaaaagccacctcctccaggggcccatgttttccctcagcagtcggatgggggaggactgctttatggacttgcatcaggagtagcaacaggactctggactgtcttcacactaggtggtgtgggcagcaaagcggctgcctctccagagctttcttcccctctggccaaccagagtctcctgcttctgctggtgttggccaatctgacagatgcctcagatgcgccaaacccctacagacaagccattatgtccttcaagaacacacaagatagcagtcctttcccctcatcaattccacatgccttccagatcaactttaatagtttgtacacagctctttgtgaacagcagacatctgatcaagcaactctcctcttgtataccttgctccatcaaaatagtaatattagaacatacatgttggctcgcacagatatggaaaatcttgttttaccaattcttgagattctgtatcatgttgaagaaaggaattcacaccatgtgtatatggcccttataatattgttgatccttacggaagatgatggcttcaacagatccattcatgaagtgatactaaaaaatattacttggtattcagaacgagttttaactgaaatctccttggggagtctcctgatcctggtggtaataagaaccattcaatacaacatgactaggacacgagacaagtaccttcacacaaattgtttggcagctttagcaaatatgtcggcacagtttcgttctctccatcagtatgctgcccagaggatcatcagtttattttctttgctgtctaaaaaacacaacaaagttctggaacaagccacacagtccttgagaggttcgctgagttctaatgatgttcctctaccagattatgcacaagacctaaatgtcattgaagaagtgattcgaatgatgttagagatcatcaactcctgcctgacaaattcccttcaccacaacccaaacttggtatacgccctgctttacaaacgcgatctctttgaacaatttcgaactcatccttcatttcaggatataatgcaaaatattgatctggtgatctccttctttagctcaaggttgctgcaagctggagctgagctgtcagtggaacgggtcctggaaatcattaagcaaggcgtcgttgcgctgcccaaagacagactgaagaaatttccagaattgaaattcaaatatgtggaagaggagcagcccgaggagttttttatcccctatgtctggtctcttgtctacaactcagcagtcggcctgtactggaatccacaggacatccagctgttcaccatggattccgactgagggcaggatgctctcccacccggacccctccagccaagcagcccttcaagttcttttatttctgggtaacagaagtagacagacaggttacttggtgtatcttctgttaaagaggattgcacgagtgtgttttcctcacacactttgatttggagaattggtgctagttggcaatagataactcagcgtagatagtattgcaaaaaggggaggaaatacacaacaataataaatgtaaaaacctgctattc

SEQ ID NO: 8393 - protein, 669 aa, Homo sapiens; identical to SEQ ID NO: 8389

SEQ ID NO: 8394 - DNA, 501 bp, Homo sapiens
ctagaagcatcttaacccaaggccaatttctcatgtaaaaggggaaagagttttgtgaaacctttacccacaagcataatgagtcttaaactcagtattttacctccaaaaatactactgggaagaaatagaaatgaatttggacaaattcatgaataacatggttagaaaaagcttttcagaaggaacagccagaattcctaccgtgtaagtcgtttcctggaaaccatgctctggatcctcccattggtgttggaagatcaactacagcttcaaggcaccaagcagatcatgaaataatcaggagccagaggggtaaattatgtaccctgagattctgatttactaaaaacaaagtatcaaatttttgactaattctaatttctaaggaaaactatctcaacaactataatttcccagttacttgaatcttcaacttgctactatgattagatgtctggttcagacatccttggtaataaatgaaattctttatgtttc

SEQ ID NO: 8395 - protein, 61 aa, Homo sapiens
ITWLEKAFQKEQPEFLPCKSFPGNHALDPPIGVGRSTTASRHQADHEIIRSQRGKLCTLRF

SEQ ID NO: 8396 - DNA, 434 bp, Homo sapiens
ctcactctgtcacctaggctggagtgcagtggtgcaaccctagctcactgcagccttgaattcctggattcaagcaattctcccatctaagcctcccaaagtgctgggattttatagggaacagccagaattcctaccgtgtaagtcgtttcctggaaaccatgctctggatcctcccattggtgttggaagatcaactacagcttcaaggcaccaagcagatcatgaaataatcaggagccagaggggtaaattatgtaccctgagattctgatttactaaaaacaaagtatcaaatttttgactaattctaatttctaaggaaaactatctcaacaactataatttcccagttacttgaatcttcaacttgctactatgattagatgtctggttcagacatccttggtaataaatgaaattctttatgtttc

SEQ ID NO: 8397 - protein, 76 aa, Homo sapiens
LTAALNSWIQAILPSKPPKVLGFYREQPEFLPCKSFPGNHALDPPIGVGRSTTASRHQADHEIIRSQRGKLCTLRF

SEQ ID NO: 8398 - DNA, 759 bp, Homo sapiens
cgaattcttacatttggaagaagtttgcagtggagtaagacttctatctatagcattctgttgaagaaaatctctcacctgcagggactacactccacctggccatgtgtcactgtgtatgcaaaatgtttgtcacctgcaaaggaacacggcaagagaagatggcgagtatctacaatgactcgatgtgaggctgatcaacatcatcacgagtctataaaatctttctgcttccaagaaaagtctctgtcaacttacacaccagactgctttcctttcctagcaatcaagtattttcacttagatattatgtatagtctcaagttttatatgtttcatcatctgaaaaggtctattttaaattctaaatgtttgctaatttctggttaaggttgtcatggagttttctccttcttcatctaaatcatctggcagtgaagttattgccttaaatcaccatatctagctaacagtatagtgctggtataagtcatctcttacttagaaaaaaaaaaacgtgttaaaaatgttaactgcaaagcacaaagtggtaatgtcatactgcccctctattttggtgcacgataaacacaaaacagcaggtgttgattttctctgatattcgagattgacagcttgtctctttcttactccactgacccccattatgtttaatctacattcatccatgacacattgcaacctgctgattttatatgattttatagccactctgtatgtaaataaaatgagtacaaa

SEQ ID NO: 8399 - protein, 70 aa, Homo sapiens
MTRCEADQHHHESIKSFCFQEKSLSTYTPDCFPFLAIKYFHLDIMYSLKFYMFHHLKRSILNSKCLLISG

SEQ ID NO: 8400 - DNA, 656 bp, Homo sapiens
gtgccacgtgaccacctggctggcgcgcgcgcctgggggtctggtccctagccgcgttctcggtcgcttccctcttctctcgccgcctcctggcctccgcaccgacgcggcccgggctggagccgagccggggccgagctgcaggccggaccggagccggatctgtacccgctgagacgtggaaacatggaggcctgagccggtgtgcgccacctgggctgcggcggcgacagcgacttctcctgacccctctgccaccctcccatccgtccgcgggtccgtggagctggagcagatcccccagccggctgagacaggttgtcttttggaaatgcaggtttaaggacaaattatctgcttaagctagaagatgggatcgaatagcagcagaatcggcgatcttcctaaaaatgagtacttgaaaaagttatcaggcacggaatctatctctgagaatgacccgttctggaatcagcttctctcattttctttccctgcaccaactagcagtagtgagttgaaactcttggaggaagcaaccatttcagtctgcaggtcattaggctgtctaggccggacacagtggctcacgcctataatcccagcattttgagaggctgatgcgagtggatcacgaagtcaggagttcaagacca

SEQ ID NO: 8401 - protein, 80 aa, Homo sapiens
MGSNSSRIGDLPKNEYLKKLSGTESISENDPFWNQLLSFSFPAPTSSSELKLLEEATISVCRSLGCLGRTQWLTPIIPAF

SEQ ID NO: 8402 - DNA, 332 bp, Homo sapiens
ctggggtgtataccctagggtttgttgttgcctgccgagaaagaattaggacacggacatgtgggtgggttaaggagtggaaagcttaatagacagaagaaaggagagaggagagcagctccttgagaaagagacgtgttcgaaaaaggaaggatgaaagtagtggctagcctcagctttaggggcaggcgatgaggagccagatcagtatttctatctcagattcagaagacccagctgtccatgtgcatcatcggggaagcatcttgctctcagaataagcagctcaatccagctcccaaattctgaccgtggcttcagtgcctttgtgg

SEQ ID NO: 8403 - protein, 55 aa, Homo sapiens
WLASALGAGDEEPDQYFYLRFRRPSCPCASSGKHLALRISSSIQLPNSDRGFSAF

SEQ ID NO: 8404 - DNA, 720 bp, Homo sapiens
gcctgggagaatactattgctcactgcacaggttaatgcactgtgattgcgtcccttttaatatacaggtggtgtcttcctggagtgaccagtttaccttctccccatacacctctcctgcctagttgttgcctagacctggtgcacactgcagtcctcgggactttctgttgccaccctcctgtattggacgtcttgtttctggatttcctatcctcttccttcttggtttatccctcattttttctgtagcacagcagttttctaattcaatacttttaggaggttgagtatggataattttggaaagtgtccccgggatgattccaatttatttaagcctgttttccagagagctgcgggtctcctaaggcctttctcatttctaacaagtctccctctctagaacactggttcccagtcgttgttttcatactagcaacattttaaaagcaggataggggtggctagtatgcaattgccaacttttgatttttccaagcaggagtatatcaaaaagctacaatttattaccagtatttcgtaaaagacaagagttattagagaagtcaagatggtggttatctctggggagagagagaagatcccaggatcagcacagagggggcttctaggatattgttcctattttatttcttagttgggtaattgtttttagcctcagaatgttagagggtattatcctttaaactgtgtgtc

SEQ ID NO: 8405 - protein, 37 aa, Homo sapiens [sequence omitted]

SEQ ID NO: 8406 - DNA, 1206 bp, Homo sapiens
atgttgtgatggcatctgtgtagtggtgggacaacaattactattgttgcgtaacaagacactccaaaatttagtggttttcagcagcagtgactcgactgggcagttctttgctgttctgggctcactcatatggctggctgggcctgggtctggacctgggccgctatgtgatttttatcttgggctttgaaaattcagtgtagggacctataaatattcaaagatgatgagatgcatccttatatattttttgtattcactctgaagctgggaaagattaaaaggaactcctgcccttgggtccctaatgaagtctgggtcctaactcaggctctattaagttctgtggctggtcaagtcactgatttaccttgggctttatttgatataaatcatgtaaatcagcaggtctcagcttttctgtccaaagccacctgagggataagataaattctcattagcaaataaacttttttaaggtataaatactattataaaaataacagatatttacagtacaacaatgcaagaggatcctaaatgaaaagcgaatgttttttctcaactctcattcccttattccagctccacagaggtaaccaattgtttttttgttgttgttgttgtatggtttgtttttgttagacagtagtcttttcctgaacagtgctgctccttgtggagcaaggctaattcataggcagtgcatccagagtccgccccagttgattttgtgtgtaaccttctagcaactttttgaaaattaatttgttcttaaatatgcacatcatttttatttatttatgtttttgagacagggtctcactctgtcatctagcttggacaacagagcaagaccctgtcttaaaaaaagaaaaaaagaataatggagtttaaatatgtaaatgacaagtctaagatttcaaggtcatactttcatgctaaggagccatcacagctacatatatatatagtgtatatatatatatagtgtgtatatatatatagtgtatatacatatagtgtatatatatatagtgtatatatatagtgtgtatatatatagtgtgtgtatatatatatatgtgtatatatatatagtgtgtgtatatatatatatttttgtttgtttgtttgtttttggaagatggagtttcgctcttgttgcccaggctgcagtgcaatggtgcaatctctgctcac

SEQ ID NO: 8407 - protein, 68 aa, Homo sapiens
MHPYIFFVFTLKLGKIKRNSCPWVPNEVWVLTQALLSSVAGQVTDLPWALFDINHVNQQVSAFLSKAT

SEQ ID NO: 8408 - DNA, 1051 bp, Homo sapiens
tgtggcccaggctggagtccagtgggccatcatagctcacggcagtttcggctttcctgggcgcaagcggttctctccttcctcagctccccaaatacctgggactacagttgaggagctcaagcttgggaaaatggtgtgcattccttgtatcgtcattccagttctgctctggatctacaaaaaattcctggagccatatatataccctctggtttcccccttcgttagtcgtatatggcctaagaaagcaatacaagaatccaatgatacaaacaaaggcaaagtaaactttaagggtgcagacatgaatggattaccaacaaaaggaccaacagaaatctgtgataaaaagaaagactaaagaaattttcctaaaggaccccatcatttaaaaaatggacctgataatatgaagcatcttccttgtaattgtctctgacctttttatctgagaccggaattcaggataggagtctagatatttacctgatactaatcaggaaatatatgatatccgtatttaaaatgtagttagttatatttaatgacctcattcctaagttcctttttcgttaatgtagctttcatttctgttattgctgtttgaataatatgattaaatagaaggtttgtgccagtagacattatgttactaaatcagcactttaaaatctttggttctctaattcatatgaatttgctgtttgctctaatttctttgggctcttctaatttgagtggagtacaattttgttgtgaaacagtccagtgaaactgtgcagggaaatgaaggtagaattttgggaggtaataatgatgtgaaacataaagatttaataattactgtccaacacagtggagcagcttgtccacaaatatagtaattactatttattgctctaaggaagattaaaaaaagatagggaaaagggggaaacttctttgaaaaatgaaacatctgttacattaatgtctaattataaaattttaatccttactgcatttcttctgttcctacaaatgtattaaacattcagtttaactggta

SEQ ID NO: 8409 - protein, 76 aa, Homo sapiens
MVCIPCIVIPVLLWIYKKFLEPYIYPLVSPFVSRIWPKKAIQESNDTNKGKVNFKGADMNGLPTKGPTEICDKKKD

SEQ ID NO: 8410 - DNA, 1713 bp, Homo sapiens
gagtgtgcccgggctagcggcctgggttgggctttgtagctgctccgcaggcccagcccgggccgcgctcgcagagtcctaggcggtgcgcggcctcctgcctcctccctcctcggcggtcgcggcccgccggcctccgcggtgcctgccttcgctctcagggtaccttccttccgcgagcgcgctcctccgccctccgccccgccctcccctcccctctgtctgtattctttgtccaccaccggcgccctcggagcttgcatttgcctctccgatactttatattgattttgttcttttccgtggccaagtatcggtttcacatcctttctatgaccttcaccgttaggcctctgttctcgtctcttttcaatcattgtcattgactcaacctgtccccgctccctctgtctccactaagatgacatgctcaactggatgacttggaggaaggtgactttccctgttatgccttccctatttcggatggagcctcagactttaactgtctactctgttgtctggacttaagttgagtgaaagaagattcctctgcaacagctttaatccgttttgctcgctttgttggcttggagcgaataattaaaataataatatctcgtagccaccttctagacttttctgacccagtttccatatgtgtgaagtaaaatatcttaccgaagtattattatgaagattaaaagataagatacaaataggcttcattccgaagagagctaaaaagtctcttaaaagccgtaattgtggcttgaggagctcaagcttgggaaaatggtgtgcattccttgtatcgtcattccagttctgctctggatctacaaaaaattcctggagccatatatataccctctggtttcccccttcgttagtcgtatatggcctaagaaagcaatacaagaatccaatgatacaaacaaaggcaaagtaaactttaagggtgcagacatgaatggattaccaacaaaaggaccaacagaaatctgtgataaaaagaaagactaaagaaattttcctaaaggaccccatcatttaaaaaatggacctgataatatgaagcatcttccttgtaattgtctctgacctttttatctgagaccggaattcaggataggagtctagatatttacctgatactaatcaggaaatatatgatatccgtatttaaaatgtagttagttatatttaatgacctcattcctaagttcctttttcgttaatgtagctttcatttctgttattgctgtttgaataatatgattaaatagaaggtttgtgccagtagacattatgttactaaatcagcactttaaaatctttggttctctaattcatatgaatttgctgtttgctctaatttctttgggctcttctaatttgagtggagtacaattttgttgtgaaacagtccagtgaaactgtgcagggaaatgaaggtagaattttgggaggtaataatgatgtgaaacataaagatttaataattactgtccaacacagtggagcagcttgtccacaaatatagtaattactatttattgctctaaggaagattaaaaaaagatagggaaaagggggaaacttctttgaaaaatgaaacatctgttacattaatgtctaattataaaattttaatccttactgcatttcttctgttcctacaaatgtattaaacattcagtttaactggta

SEQ ID NO: 8411 - protein, 76 aa, Homo sapiens; identical to SEQ ID NO: 8409

SEQ ID NO: 8412 - DNA, 1133 bp, Homo sapiens
attgtcagctgcgtttccgcggtcgcgggtgagtgtgcccgggctagcggcctgggttgggctttgtagctgctccgcaggcccagcccgggccgcgctcgcagagtcctaggcggtgcgcggcctcctgcctcctccctcctcggcggtcgcggcccgccggcctccgcggtgcctgccttcgctctcaggttgaggagctcaagcttgggaaaatggtgtgcattccttgtatcgtcattccagttctgctctggatctacaaaaaattcctggagccatatatataccctctggtttcccccttcgttagtcgtatatggcctaagaaagcaatacaagaatccaatgatacaaacaaaggcaaagtaaactttaagggtgcagacatgaatggattaccaacaaaaggaccaacagaaatctgtgataaaaagaaagactaaagaaattttcctaaaggaccccatcatttaaaaaatggacctgataatatgaagcatcttccttgtaattgtctctgacctttttatctgagaccggaattcaggataggagtctagatatttacctgatactaatcaggaaatatatgatatccgtatttaaaatgtagttagttatatttaatgacctcattcctaagttcctttttcgttaatgtagctttcatttctgttattgctgtttgaataatatgattaaatagaaggtttgtgccagtagacattatgttactaaatcagcactttaaaatctttggttctctaattcatatgaatttgctgtttgctctaatttctttgggctcttctaatttgagtggagtacaattttgttgtgaaacagtccagtgaaactgtgcagggaaatgaaggtagaattttgggaggtaataatgatgtgaaacataaagatttaataattactgtccaacacagtggagcagcttgtccacaaatatagtaattactatttattgctctaaggaagattaaaaaaagatagggaaaagggggaaacttctttgaaaaatgaaacatctgttacattaatgtctaattataaaattttaatccttactgcatttcttctgttcctacaaatgtattaaacattcagtttaactggta

SEQ ID NO: 8413 - protein, 76 aa, Homo sapiens; identical to SEQ ID NO: 8409

SEQ ID NO: 8414 - DNA, 1009 bp, Homo sapiens
ggctcggctgcggatcgtccctccctccggaagtgcggacattgtcagctgcgtttccgcggtcgcggttgaggagctcaagcttgggaaaatggtgtgcattccttgtatcgtcattccagttctgctctggatctacaaaaaattcctggagccatatatataccctctggtttcccccttcgttagtcgtatatggcctaagaaagcaatacaagaatccaatgatacaaacaaaggcaaagtaaactttaagggtgcagacatgaatggattaccaacaaaaggaccaacagaaatctgtgataaaaagaaagactaaagaaattttcctaaaggaccccatcatttaaaaaatggacctgataatatgaagcatcttccttgtaattgtctctgacctttttatctgagaccggaattcaggataggagtctagatatttacctgatactaatcaggaaatatatgatatccgtatttaaaatgtagttagttatatttaatgacctcattcctaagttcctttttcgttaatgtagctttcatttctgttattgctgtttgaataatatgattaaatagaaggtttgtgccagtagacattatgttactaaatcagcactttaaaatctttggttctctaattcatatgaatttgctgtttgctctaatttctttgggctcttctaatttgagtggagtacaattttgttgtgaaacagtccagtgaaactgtgcagggaaatgaaggtagaattttgggaggtaataatgatgtgaaacataaagatttaataattactgtccaacacagtggagcagcttgtccacaaatatagtaattactatttattgctctaaggaagattaaaaaaagatagggaaaagggggaaacttctttgaaaaatgaaacatctgttacattaatgtctaattataaaattttaatccttactgcatttcttctgttcctacaaatgtattaaacattcagtttaactggta

SEQ ID NO: 8415 - protein, 76 aa, Homo sapiens; identical to SEQ ID NO: 8409

SEQ ID NO: 8416 - DNA, 1135 bp, Homo sapiens
agggtttagatgtagattctctggtcattgagcatatccaagtgaacaaagcacctaagatgcgccgccggacctacagagctcatggtcggattaacccatacatgagctctccctgccacattgagatgatccttacggaaaaggaacagattgttcctaaaccagaagaggaggttgcccagaagaaaaagttgaggagctcaagcttgggaaaatggtgtgcattccttgtatcgtcattccagttctgctctggatctacaaaaaattcctggagccatatatataccctctggtttcccccttcgttagtcgtatatggcctaagaaagcaatacaagaatccaatgatacaaacaaaggcaaagtaaactttaagggtgcagacatgaatggattaccaacaaaaggaccaacagaaatctgtgataaaaagaaagactaaagaaattttcctaaaggaccccatcatttaaaaaatggacctgataatatgaagcatcttccttgtaattgtctctgacctttttatctgagaccggaattcaggataggagtctagatatttacctgatactaatcaggaaatatatgatatccgtatttaaaatgtagttagttatatttaatgacctcattcctaagttcctttttcgttaatgtagctttcatttctgttattgctgtttgaataatatgattaaatagaaggtttgtgccagtagacattatgttactaaatcagcactttaaaatctttggttctctaattcatatgaatttgctgtttgctctaatttctttgggctcttctaatttgagtggagtacaattttgttgtgaaacagtccagtgaaactgtgcagggaaatgaaggtagaattttgggaggtaataatgatgtgaaacataaagatttaataattactgtccaacacagtggagcagcttgtccacaaatatagtaattactatttattgctctaaggaagattaaaaaaagatagggaaaagggggaaacttctttgaaaaatgaaacatctgttacattaatgtctaattataaaattttaatccttactgcatttcttctgttcctacaaatgtattaaacattcagtttaactggta

SEQ ID NO: 8417 - protein, 104 aa, Homo sapiens
MRRRTYRAHGRINPYMSSPCHIEMILTEKEQIVPKPEEEVAQKKKLRSSSLGKWCAFLVSSFQFCSGSTKNSWSHIYTLWFPPSLVVYGLRKQYKNPMIQTKAK

SEQ ID NO: 8418 - DNA, 1088 bp, Homo sapiens
agggtttagatgtagattctctggtcattgagcatatccaagtgaacaaagcacctaagatgcgccgccggacctacagagctcatggtcggattaacccatacatgagctctccctgccacattgagatgatccttacggaaaaggaacagattgttcctaaaccagaagaggaggttgcccagaagaaaaagttgaggagctcaagcttgggaaaatggtgtgcattccttgtatcgtcattccagttctgctctggatctacaaaaaattcctggagccatatatataccctctggtttcccccttcgttagtcgtatatggcctaagaaagcaatacaagaatccaatgatacaaacaaaggcaaagtaaactttaagggtgcagacatgaatggattaccaacaaaaggaccaacagaaatctgtgataaaaagaaagactaaagaaattttcctaaaggaccccatcatttaaaaaatggacctgataatatgaagcatcttccttgtaattgtctctgacctttttatctgagaccggaattcaggataggagtctagatatttacctgatactaatcaggaaatatatgatatccgtatttaaaatgtagttagttatatttaatgacctcattcctaagttcctttttcgttaatgtagctttcatttctgttattgctgtttgaataatatgattaaatagaaggtttgtgccagtagacattatgttactaaatcagcactttaaaatctttggttctctaattcatatgaatttgctgtttgctctaatttctttgggctcttctaatttgagtggagtacaattttgttgtgaaacagtccagtgaaactgtgcagggaaatgaaggtagaattttgggaggtaataatgatgtgaaacataaagatttaataattactgtccaacacagtggagcagcttgtccacaaatatagtaattactatttattgctctaaggaagattaaaaaaagatagggaaaagggggaaacttctttgaaaaatgaaacatctgttacattaatgtctaattataaaattttaatccttactgc

SEQ ID NO: 8419 - protein, 104 aa, Homo sapiens; identical to SEQ ID NO: 8417

SEQ ID NO: 8420 - DNA, 1004 bp, Homo sapiens
tgtggcccaggctggagtccagtgggccatcatagctcacggcagtttcggctttcctgggcgcaagcggttctctccttcctcagctccccaaatacctgggactacagttgaggagctcaagcttgggaaaatggtgtgcattccttgtatcgtcattccagttctgctctggatctacaaaaaattcctggagccatatatataccctctggtttcccccttcgttagtcgtatatggcctaagaaagcaatacaagaatccaatgatacaaacaaaggcaaagtaaactttaagggtgcagacatgaatggattaccaacaaaaggaccaacagaaatctgtgataaaaagaaagactaaagaaattttcctaaaggaccccatcatttaaaaaatggacctgataatatgaagcatcttccttgtaattgtctctgacctttttatctgagaccggaattcaggataggagtctagatatttacctgatactaatcaggaaatatatgatatccgtatttaaaatgtagttagttatatttaatgacctcattcctaagttcctttttcgttaatgtagctttcatttctgttattgctgtttgaataatatgattaaatagaaggtttgtgccagtagacattatgttactaaatcagcactttaaaatctttggttctctaattcatatgaatttgctgtttgctctaatttctttgggctcttctaatttgagtggagtacaattttgttgtgaaacagtccagtgaaactgtgcagggaaatgaaggtagaattttgggaggtaataatgatgtgaaacataaagatttaataattactgtccaacacagtggagcagcttgtccacaaatatagtaattactatttattgctctaaggaagattaaaaaaagatagggaaaagggggaaacttctttgaaaaatgaaacatctgttacattaatgtctaattataaaattttaatccttactgc

SEQ ID NO: 8421 - protein, 76 aa, Homo sapiens; identical to SEQ ID NO: 8409

SEQ ID NO: 8422 - DNA, 1666 bp, Homo sapiens
gagtgtgcccgggctagcggcctgggttgggctttgtagctgctccgcaggcccagcccgggccgcgctcgcagagtcctaggcggtgcgcggcctcctgcctcctccctcctcggcggtcgcggcccgccggcctccgcggtgcctgccttcgctctcagggtaccttccttccgcgagcgcgctcctccgccctccgccccgccctcccctcccctctgtctgtattctttgtccaccaccggcgccctcggagcttgcatttgcctctccgatactttatattgattttgttcttttccgtggccaagtatcggtttcacatcctttctatgaccttcaccgttaggcctctgttctcgtctcttttcaatcattgtcattgactcaacctgtccccgctccctctgtctccactaagatgacatgctcaactggatgacttggaggaaggtgactttccctgttatgccttccctatttcggatggagcctcagactttaactgtctactctgttgtctggacttaagttgagtgaaagaagattcctctgcaacagctttaatccgttttgctcgctttgttggcttggagcgaataattaaaataataatatctcgtagccaccttctagacttttctgacccagtttccatatgtgtgaagtaaaatatcttaccgaagtattattatgaagattaaaagataagatacaaataggcttcattccgaagagagctaaaaagtctcttaaaagccgtaattgtggcttgaggagctcaagcttgggaaaatggtgtgcattccttgtatcgtcattccagttctgctctggatctacaaaaaattcctggagccatatatataccctctggtttcccccttcgttagtcgtatatggcctaagaaagcaatacaagaatccaatgatacaaacaaaggcaaagtaaactttaagggtgcagacatgaatggattaccaacaaaaggaccaacagaaatctgtgataaaaagaaagactaaagaaattttcctaaaggaccccatcatttaaaaaatggacctgataatatgaagcatcttccttgtaattgtctctgacctttttatctgagaccggaattcaggataggagtctagatatttacctgatactaatcaggaaatatatgatatccgtatttaaaatgtagttagttatatttaatgacctcattcctaagttcctttttcgttaatgtagctttcatttctgttattgctgtttgaataatatgattaaatagaaggtttgtgccagtagacattatgttactaaatcagcactttaaaatctttggttctctaattcatatgaatttgctgtttgctctaatttctttgggctcttctaatttgagtggagtacaattttgttgtgaaacagtccagtgaaactgtgcagggaaatgaaggtagaattttgggaggtaataatgatgtgaaacataaagatttaataattactgtccaacacagtggagcagcttgtccacaaatatagtaattactatttattgctctaaggaagattaaaaaaagatagggaaaagggggaaacttctttgaaaaatgaaacatctgttacattaatgtctaattataaaattttaatccttactgc

SEQ ID NO: 8423 - protein, 76 aa, Homo sapiens; identical to SEQ ID NO: 8409

SEQ ID NO: 8424 - DNA, 1086 bp, Homo sapiens
attgtcagctgcgtttccgcggtcgcgggtgagtgtgcccgggctagcggcctgggttgggctttgtagctgctccgcaggcccagcccgggccgcgctcgcagagtcctaggcggtgcgcggcctcctgcctcctccctcctcggcggtcgcggcccgccggcctccgcggtgcctgccttcgctctcaggttgaggagctcaagcttgggaaaatggtgtgcattccttgtatcgtcattccagttctgctctggatctacaaaaaattcctggagccatatatataccctctggtttcccccttcgttagtcgtatatggcctaagaaagcaatacaagaatccaatgatacaaacaaaggcaaagtaaactttaagggtgcagacatgaatggattaccaacaaaaggaccaacagaaatctgtgataaaaagaaagactaaagaaattttcctaaaggaccccatcatttaaaaaatggacctgataatatgaagcatcttccttgtaattgtctctgacctttttatctgagaccggaattcaggataggagtctagatatttacctgatactaatcaggaaatatatgatatccgtatttaaaatgtagttagttatatttaatgacctcattcctaagttcctttttcgttaatgtagctttcatttctgttattgctgtttgaataatatgattaaatagaaggtttgtgccagtagacattatgttactaaatcagcactttaaaatctttggttctctaattcatatgaatttgctgtttgctctaatttctttgggctcttctaatttgagtggagtacaattttgttgtgaaacagtccagtgaaactgtgcagggaaatgaaggtagaattttgggaggtaataatgatgtgaaacataaagatttaataattactgtccaacacagtggagcagcttgtccacaaatatagtaattactatttattgctctaaggaagattaaaaaaagatagggaaaagggggaaacttctttgaaaaatgaaacatctgttacattaatgtctaattataaaattttaatccttactgc

SEQ ID NO: 8425 - protein, 76 aa, Homo sapiens; identical to SEQ ID NO: 8409

SEQ ID NO: 8426 - DNA, 962 bp, Homo sapiens
ggctcggctgcggatcgtccctccctccggaagtgcggacattgtcagctgcgtttccgcggtcgcggttgaggagctcaagcttgggaaaatggtgtgcattccttgtatcgtcattccagttctgctctggatctacaaaaaattcctggagccatatatataccctctggtttcccccttcgttagtcgtatatggcctaagaaagcaatacaagaatccaatgatacaaacaaaggcaaagtaaactttaagggtgcagacatgaatggattaccaacaaaaggaccaacagaaatctgtgataaaaagaaagactaaagaaattttcctaaaggaccccatcatttaaaaaatggacctgataatatgaagcatcttccttgtaattgtctctgacctttttatctgagaccggaattcaggataggagtctagatatttacctgatactaatcaggaaatatatgatatccgtatttaaaatgtagttagttatatttaatgacctcattcctaagttcctttttcgttaatgtagctttcatttctgttattgctgtttgaataatatgattaaatagaaggtttgtgccagtagacattatgttactaaatcagcactttaaaatctttggttctctaattcatatgaatttgctgtttgctctaatttctttgggctcttctaatttgagtggagtacaattttgttgtgaaacagtccagtgaaactgtgcagggaaatgaaggtagaattttgggaggtaataatgatgtgaaacataaagatttaataattactgtccaacacagtggagcagcttgtccacaaatatagtaattactatttattgctctaaggaagattaaaaaaagatagggaaaagggggaaacttctttgaaaaatgaaacatctgttacattaatgtctaattataaaattttaatccttactgc

SEQ ID NO: 8427 - protein, 76 aa, Homo sapiens; identical to SEQ ID NO: 8409

SEQ ID NO: 8428 - DNA, 1354 bp, Homo sapiens
gagtgtgcccgggctagcggcctgggttgggctttgtagctgctccgcaggcccagcccgggccgcgctcgcagagtcctaggcggtgcgcggcctcctgcctcctccctcctcggcggtcgcggcccgccggcctccgcggtgcctgccttcgctctcagggtaccttccttccgcgagcgcgctcctccgccctccgccccgccctcccctcccctctgtctgtattctttgtccaccaccggcgccctcggagcttgcatttgcctctccgatactttatattgattttgttcttttccgtggccaagtatcggtttcacatcctttctatgaccttcaccgttaggcctctgttctcgtctcttttcaatcattgtcattgactcaacctgtccccgctccctctgtctccactaagatgacatgctcaactggatgacttggaggaaggtgactttccctgttatgccttccctatttcggatggagcctcagactttaactgtctactctgttgtctggacttaagttgagtgaaagaagattcctctgcaacagctttaatccgttttgctcgctttgttggcttggagcgaataattaaaataataatatctcgtagccaccttctagacttttctgacccagtttccatatgtgtgaagtaaaatatcttaccgaagtattattatgaagattaaaagataagatacaaataggcttcattccgaagagagctaaaaagtctcttaaaagccgtaattgtggcttgaggagctcaagcttgggaaaatggtgtgcattccttgtatcgtcattccagttctgctctggatctacaaaaaattcctggagccatatatataccctctggtttcccccttcgttagtcgtatatggcctaagaaagcaatacaagaatccaatgatacaaacaaaggcaaagtaaactttaagggtgcagacatgaatggattaccaacaaaaggaccaacagaaatctgtgataaaaagaaagactaaagaaattttcctaaaggaccccatcatttaaaaaatggacctgataatatgaagcatcttccttgtaattgtctctgacctttttatctgagaccggaattcaggataggagtctagatatttacctgatactaatcaggaaatatatgatatccgtatttaaaatgtagttagttatatttaatgacctcattcctaagttcctttttcgttaatgtagctttcatttctgttattgctgtttgaataatatgattaaatagaaggtttgtgccagtagacattatgttactaaatcagcactttaaaatctttggttctctaattc

SEQ ID NO: 8429 - protein, 76 aa, Homo sapiens; identical to SEQ ID NO: 8409

SEQ ID NO: 8430 - DNA, 774 bp, Homo sapiens
attgtcagctgcgtttccgcggtcgcgggtgagtgtgcccgggctagcggcctgggttgggctttgtagctgctccgcaggcccagcccgggccgcgctcgcagagtcctaggcggtgcgcggcctcctgcctcctccctcctcggcggtcgcggcccgccggcctccgcggtgcctgccttcgctctcaggttgaggagctcaagcttgggaaaatggtgtgcattccttgtatcgtcattccagttctgctctggatctacaaaaaattcctggagccatatatataccctctggtttcccccttcgttagtcgtatatggcctaagaaagcaatacaagaatccaatgatacaaacaaaggcaaagtaaactttaagggtgcagacatgaatggattaccaacaaaaggaccaacagaaatctgtgataaaaagaaagactaaagaaattttcctaaaggaccccatcatttaaaaaatggacctgataatatgaagcatcttccttgtaattgtctctgacctttttatctgagaccggaattcaggataggagtctagatatttacctgatactaatcaggaaatatatgatatccgtatttaaaatgtagttagttatatttaatgacctcattcctaagttcctttttcgttaatgtagctttcatttctgttattgctgtttgaataatatgattaaatagaaggtttgtgccagtagacattatgttactaaatcagcactttaaaatctttggttctctaattc

SEQ ID NO: 8431 - protein, 76 aa, Homo sapiens; identical to SEQ ID NO: 8409

SEQ ID NO: 8432 - DNA, 634 bp, Homo sapiens
gtccctccctccggaagtgcggacattgtcagctgcgtttccgcggtcgcggttgaggagctcaagcttgggaaaatggtgtgcattccttgtatcgtcattccagttctgctctggatctacaaaaaattcctggagccatatatataccctctggtttcccccttcgttagtcgtatatggcctaagaaagcaatacaagaatccaatgatacaaacaaaggcaaagtaaactttaagggtgcagacatgaatggattaccaacaaaaggaccaacagaaatctgtgataaaaagaaagactaaagaaattttcctaaaggaccccatcatttaaaaaatggacctgataatatgaagcatcttccttgtaattgtctctgacctttttatctgagaccggaattcaggataggagtctagatatttacctgatactaatcaggaaatatatgatatccgtatttaaaatgtagttagttatatttaatgacctcattcctaagttcctttttcgttaatgtagctttcatttctgttattgctgtttgaataatatgattaaatagaaggtttgtgccagtagacattatgttactaaatcagcactttaaaatctttggttctctaattc

SEQ ID NO: 8433 - protein, 76 aa, Homo sapiens; identical to SEQ ID NO: 8409

SEQ ID NO: 8434 - DNA, 482 bp, Homo sapiens
gttaccagttacctctgtgagaactttggacaggttacaacttttggatttttttttttttttaatcttgagacagggtctgcctctgtggcccaggctggagtccagtgggccatcatagctcacggcagtttcggctttcctgggcgcaagcggttctctccttcctcagctccccaaatactgggattacaggtgtgagccaccacacccggctcattttttaaactctaaatagacatagtagcaagggtacccaacctcactgattgaggattaaatgagttgttatatgtaaactgtctagcacctaccaaatgttgttgtttttcctttataatcaaattcatgattaaggagcagtgactggaagtttggaagcaggcacctcattattattcatgcctaccacctattatttctttattttgagatggagtcttgctctgtcacctaggctggagtgcagtggtgggatctcg

SEQ ID NO: 8435 - protein, 66 aa, Homo sapiens
VTSYLCENFGQVTTFGFFFFFNLETGSASVAQAGVQWAIIAHGSFGFPGRKRFSPSSAPQILGLQV

SEQ ID NO: 8436 - DNA, 2447 bp, Homo sapiens
agggttgactggattggtgaggcccgtgtggctacttctgtggaagcagtgctgtagttactggaagataaaagggaaagcaagcccttggtgggggaaagtatggctgcgatgatggcatttcttaggacacctttggattaataatgaaaacaactactctctgagcagctgttcgaatcatctgatatttatactgaatgagttactgtaagtacgtattgacagaattacactgtactttcctctaggtgatctgtgaaaatggttcgctattcacttgacccggagaaccccacgaaatgtaagtggacaggaggtagatacccatttcctacttggggcttggcataagataccaaaaattaaccaaaacgttttattttctagcatgcaaatcaagaggttccaatcttcgtgttcactttaaggtatgcgattcatagttgtgatccaacagttcctcatgttccactcaaaaaaggtagctgcagtgatgactttcttaggacacctttggatttaccgtgaaaattaataaattctgagcagccaccttatatttaggcattgatgatcagggtgtaaggatgtagcgtttgtgaaattgagaagtagtaccagaaaaccatttgaaaacctagtgtgcagatcaagatggggcattttaattgtaattacatgatgatggaatttaaacgttttatagtgaataaatggagttttggagttttctctagcttcaacgaagtttacctggcttttagtcacaagtttttttaattgccttgcccccaaagaatagaaataactcgacattttgaaaagctgaaaattgaaaatttaacgtttactttaaaaattaaagctttgatctagttaaccaacactttattcttcatacttagaacactcgtgaaactgctcaggccatcaagggtatgcatatacgaaaagccacgaagtatctgaaagatgtcactttacagaaacagtgtgtaccattccgacgttacaatggtggagttggcaggtgtgcgcaggtgagaattcttagttgccatttgaaaagacagattttaatggaaaagtgatgggataggataagaatggctaagatctgtgctgatgaacctatttctggttgctgtaatgacaggacaccttggattgatggtgaaataaaccatatcctaagaaaccgtgatatcagataaattcatcttggctgtaatgttaatttaaatcaaggaaaatgactcatcatctccattttctttcaggccaagcaatggggctggacacaaggtcggtggcccaaaaagagtgctgaatttttgctgcacatgcttaaaaacgcagagagtaatgctgaacttaagggtttagatgtagattctctggtcattgagcatatccaagtgaacaaagcacctaagatgcgccgccggacctacagagctcatggtcggattaacccatacatgagctctccctgccacattgagatgatccttacggaaaaggaacagattgttcctaaaccagaagaggaggttgcccagaagaaaaaggtaaataagtagttgctcggttttgtttgtgatagtagaaagatttgtggttgctgtgatgactatcttaggacacctttggaataactatgaaagaaaactattctgagcaaccctttcacctgtcttattttggcttttgtaagtttgtttcttgactaataataaatggtaagttttctgtaatcccagcactttgggaggctgaggtgggtggatcacaaggtcaggagatcgagaccatcctggctaacacagtgaaaccccgtctctactaaaaatgcaaaaaaaaattagctgggcgtggtggcgggtatctgtagtcccagctactcaggaggctgaggcaggagaatggcatgaacccgggaggaggaactaggagtgagccgagatcgcgccactgcactccagcctgggtgacagagcgagacgctgtctcaaaaaaaaaaaaactggtagttttatattcagtacctcaggcccgtatgattatctgctgatggccccacttagatgtacatagccacttcaaaatgggccctctccccaaatctaagaagcttgttttcagtaattgatcacatttagttcttttaagtcaagaacctgagtgattctgtacacttctttttacatctaatgaacttaagttctgttgatttctaccatttaagtatttttcccccttagtccttaacgactaggtttcctgcctccagaataagctgaagtcctccaagatgtactgtggttttctctaagaaacttaacacatttttctttccccagatatcccagaagaaactgaagaaacaaaaacttatggcacgggagtaaattcagcattaaaataaatgtaattaaaaggaa

SEQ ID NO: 8437 - protein, 79 aa, Homo sapiens
MLKNAESNAELKGLDVDSLVIEHIQVNKAPKMRRRTYRAHGRINPYMSSPCHIEMILTEKEQIVPKPEEEVAQKKKVNK

SEQ ID NO: 8438 - DNA, 2166 bp, Homo sapiens
gtttctcctgcgttgctccgagggcccaatcctcctgccatcgccgccatcctggcttcgggggcgccggcctccaggcccccgggaggagaactcctagggctactaaatcctcgctggaggcggtggcttcttatgcgggaggacgtggcggagggcctgactttgggagccggggtcagtcggcctctgaggtccgcagagggacgtgatgggcgggaatggggactaccgggctcctccactggtgggggcgccggcccgccgtggggtgcgggccgcctggggtccgtgcggactccggaggtccggtgtctagtggtgagtggtggccgcaacgaggaaaaagttttgggggaaagaaaagtcgggtggaggcgtaacacgttactacaagagtgttgcgtacaggagggctcttaaagtgggtcatagcccgaaggtgttgagagagacggcactcactacctgcagccctgacagcaaaggggtttctgtagagcgggagggaggaggtgtagagggttacggttgagttgtgccctgcggatgcgtcgagtcattttacgcctggaagatccagcattggattgaaacaggctgtattttcttccaaagggttgactggattggtgaggcccgtgtggctacttctgtggaagcagtgctgtagttactggaagataaaagggaaagcaagcccttggtgggggaaagtatggctgcgatgatggcatttcttaggacacctttggattaataatgaaaacaactactctctgagcagctgttcgaatcatctgatatttatactgaatgagttactcatgcaaatcaagaggttccaatcttcgtgttcactttaagaacactcgtgaaactgctcaggccatcaagggtatgcatatacgaaaagccacgaagtatctgaaagatgtcactttacagaaacagtgtgtaccattccgacgttacaatggtggagttggcaggtgtgcgcaggccaagcaatggggctggacacaaggtcggtggcccaaaaagagtgctgaatttttgctgcacatgcttaaaaacgcagagagtaatgctgaacttaagggtttagatgtagattctctggtcattgagcatatccaagtgaacaaagcacctaagatgcgccgccggacctacagagctcatggtcggattaacccatacatgagctctccctgccacattgagatgatccttacggaaaaggaacagattgttcctaaaccagaagaggaggttgcccagaagaaaaaggtaaataagtagttgctcggttttgtttgtgatagtagaaagatttgtggttgctgtgatgactatcttaggacacctttggaataactatgaaagaaaactattctgagcaaccctttcacctgtcttattttggcttttgtaagtttgtttcttgactaataataaatggtaagttttctgtaatcccagcactttgggaggctgaggtgggtggatcacaaggtcaggagatcgagaccatcctggctaacacagtgaaaccccgtctctactaaaaatgcaaaaaaaaattagctgggcgtggtggcgggtatctgtagtcccagctactcaggaggctgaggcaggagaatggcatgaacccgggaggaggaactaggagtgagccgagatcgcgccactgcactccagcctgggtgacagagcgagacgctgtctcaaaaaaaaaaaaactggtagttttatattcagtacctcaggcccgtatgattatctgctgatggccccacttagatgtacatagccacttcaaaatgggccctctccccaaatctaagaagcttgttttcagtaattgatcacatttagttcttttaagtcaagaacctgagtgattctgtacacttctttttacatctaatgaacttaagttctgttgatttctaccatttaagtatttttcccccttagtccttaacgactaggtttcctgcctccagaataagctgaagtcctccaagatgtactgtggttttctctaagaaacttaacacatttttctttccccagatatcccagaagaaactgaagaaacaaaaacttatggcacgggagtaaattcagcattaaaataaatgtaattaaaaggaa

SEQ ID NO: 8439 - protein, 162 aa, Homo sapiens
MSYSCKSRGSNLRVHFKNTRETAQAIKGMHIRKATKYLKDVTLQKQCVPFRRYNGGVGRCAQAKQWGWTQGRWPKKSAEFLLHMLKNAESNAELKGLDVDSLVIEHIQVNKAPKMRRRTYRAHGRINPYMSSPCHIEMILTEKEQIVPKPEEEVAQKKKVNK

SEQ ID NO: 8440 - DNA, 1677 bp, Homo sapiens
gaggtgagtgtttctcctgcgttgctccgagggcccaatcctcctgccatcgccgccatcctggcttcgggggcgccggcctccaggcccccgggaggagaactcctagggctactaaatcctcgctggaggcggtggcttcttatgcgggaggacgtggcggagggcctgactttgggagccgggggttgactggattggtgaggcccgtgtggctacttctgtggaagcagtgctgtagttactggaagataaaagggaaagcaagcccttggtgggggaaagtgatctgtgaaaatggttcgctattcacttgacccggagaaccccacgaaatcatgcaaatcaagaggttccaatcttcgtgttcactttaagaacactcgtgaaactgctcaggccatcaagggtatgcatatacgaaaagccacgaagtatctgaaagatgtcactttacagaaacagtgtgtaccattccgacgttacaatggtggagttggcaggtgtgcgcaggccaagcaatggggctggacacaaggtcggtggcccaaaaagagtgctgaatttttgctgcacatgcttaaaaacgcagagagtaatgctgaacttaagggtttagatgtagattctctggtcattgagcatatccaagtgaacaaagcacctaagatgcgccgccggacctacagagctcatggtcggattaacccatacatgagctctccctgccacattgagatgatccttacggaaaaggaacagattgttcctaaaccagaagaggaggttgcccagaagaaaaaggtaaataagtagttgctcggttttgtttgtgatagtagaaagatttgtggttgctgtgatgactatcttaggacacctttggaataactatgaaagaaaactattctgagcaaccctttcacctgtcttattttggcttttgtaagtttgtttcttgactaataataaatggtaagttttctgtaatcccagcactttgggaggctgaggtgggtggatcacaaggtcaggagatcgagaccatcctggctaacacagtgaaaccccgtctctactaaaaatgcaaaaaaaaattagctgggcgtggtggcgggtatctgtagtcccagctactcaggaggctgaggcaggagaatggcatgaacccgggaggaggaactaggagtgagccgagatcgcgccactgcactccagcctgggtgacagagcgagacgctgtctcaaaaaaaaaaaaactggtagttttatattcagtacctcaggcccgtatgattatctgctgatggccccacttagatgtacatagccacttcaaaatgggccctctccccaaatctaagaagcttgttttcagtaattgatcacatttagttcttttaagtcaagaacctgagtgattctgtacacttctttttacatctaatgaacttaagttctgttgatttctaccatttaagtatttttcccccttagtccttaacgactaggtttcctgcctccagaataagctgaagtcctccaagatgtactgtggttttctctaagaaacttaacacatttttctttccccagatatcccagaagaaactgaagaaacaaaaacttatggcacgggagtaaattcagcattaaaataaatgtaattaaaaggaa

SEQ ID NO: 8441 - protein, 172 aa, Homo sapiens [sequence omitted]

SEQ ID NO: 8442 - DNA, 1596 bp, Homo sapiens
gaggtgagtgtttctcctgcgttgctccgagggcccaatcctcctgccatcgccgccatcctggcttcgggggcgccggcctccaggcccccgggaggagaactcctagggctactaaatcctcgctggaggcggtggcttcttatgcgggaggacgtggcggagggcctgactttgggagccggggtcagtcggcctctgaggtgatctgtgaaaatggttcgctattcacttgacccggagaaccccacgaaatcatgcaaatcaagaggttccaatcttcgtgttcactttaagaacactcgtgaaactgctcaggccatcaagggtatgcatatacgaaaagccacgaagtatctgaaagatgtcactttacagaaacagtgtgtaccattccgacgttacaatggtggagttggcaggtgtgcgcaggccaagcaatggggctggacacaaggtcggtggcccaaaaagagtgctgaatttttgctgcacatgcttaaaaacgcagagagtaatgctgaacttaagggtttagatgtagattctctggtcattgagcatatccaagtgaacaaagcacctaagatgcgccgccggacctacagagctcatggtcggattaacccatacatgagctctccctgccacattgagatgatccttacggaaaaggaacagattgttcctaaaccagaagaggaggttgcccagaagaaaaaggtaaataagtagttgctcggttttgtttgtgatagtagaaagatttgtggttgctgtgatgactatcttaggacacctttggaataactatgaaagaaaactattctgagcaaccctttcacctgtcttattttggcttttgtaagtttgtttcttgactaataataaatggtaagttttctgtaatcccagcactttgggaggctgaggtgggtggatcacaaggtcaggagatcgagaccatcctggctaacacagtgaaaccccgtctctactaaaaatgcaaaaaaaaattagctgggcgtggtggcgggtatctgtagtcccagctactcaggaggctgaggcaggagaatggcatgaacccgggaggaggaactaggagtgagccgagatcgcgccactgcactccagcctgggtgacagagcgagacgctgtctcaaaaaaaaaaaaactggtagttttatattcagtacctcaggcccgtatgattatctgctgatggccccacttagatgtacatagccacttcaaaatgggccctctccccaaatctaagaagcttgttttcagtaattgatcacatttagttcttttaagtcaagaacctgagtgattctgtacacttctttttacatctaatgaacttaagttctgttgatttctaccatttaagtatttttcccccttagtccttaacgactaggtttcctgcctccagaataagctgaagtcctccaagatgtactgtggttttctctaagaaacttaacacatttttctttccccagatatcccagaagaaactgaagaaacaaaaacttatggcacgggagtaaattcagcattaaaataaatgtaattaaaaggaa

SEQ ID NO: 8443 - protein, 172 aa, Homo sapiens [sequence omitted]

SEQ ID NO: 8444 - DNA, 1416 bp, Homo sapiens
cctctttccctaagcagcctgaggtgatctgtgaaaatggttcgctattcacttgacccggagaaccccacgaaatcatgcaaatcaagaggttccaatcttcgtgttcactttaagaacactcgtgaaactgctcaggccatcaagggtatgcatatacgaaaagccacgaagtatctgaaagatgtcactttacagaaacagtgtgtaccattccgacgttacaatggtggagttggcaggtgtgcgcaggccaagcaatggggctggacacaaggtcggtggcccaaaaagagtgctgaatttttgctgcacatgcttaaaaacgcagagagtaatgctgaacttaagggtttagatgtagattctctggtcattgagcatatccaagtgaacaaagcacctaagatgcgccgccggacctacagagctcatggtcggattaacccatacatgagctctccctgccacattgagatgatccttacggaaaaggaacagattgttcctaaaccagaagaggaggttgcccagaagaaaaaggtaaataagtagttgctcggttttgtttgtgatagtagaaagatttgtggttgctgtgatgactatcttaggacacctttggaataactatgaaagaaaactattctgagcaaccctttcacctgtcttattttggcttttgtaagtttgtttcttgactaataataaatggtaagttttctgtaatcccagcactttgggaggctgaggtgggtggatcacaaggtcaggagatcgagaccatcctggctaacacagtgaaaccccgtctctactaaaaatgcaaaaaaaaattagctgggcgtggtggcgggtatctgtagtcccagctactcaggaggctgaggcaggagaatggcatgaacccgggaggaggaactaggagtgagccgagatcgcgccactgcactccagcctgggtgacagagcgagacgctgtctcaaaaaaaaaaaaactggtagttttatattcagtacctcaggcccgtatgattatctgctgatggccccacttagatgtacatagccacttcaaaatgggccctctccccaaatctaagaagcttgttttcagtaattgatcacatttagttcttttaagtcaagaacctgagtgattctgtacacttctttttacatctaatgaacttaagttctgttgatttctaccatttaagtatttttcccccttagtccttaacgactaggtttcctgcctccagaataagctgaagtcctccaagatgtactgtggttttctctaagaaacttaacacatttttctttccccagatatcccagaagaaactgaagaaacaaaaacttatggcacgggagtaaattcagcattaaaataaatgtaattaaaaggaa

SEQ ID NO: 8445 - protein, 172 aa, Homo sapiens [sequence omitted]

SEQ ID NO: 8446 - DNA, 1807 bp, Homo sapiens
agggttgactggattggtgaggcccgtgtggctacttctgtggaagcagtgctgtagttactggaagataaaagggaaagcaagcccttggtgggggaaagtatggctgcgatgatggcatttcttaggacacctttggattaataatgaaaacaactactctctgagcagctgttcgaatcatctgatatttatactgaatgagttactgtaagtacgtattgacagaattacactgtactttcctctaggtgatctgtgaaaatggttcgctattcacttgacccggagaaccccacgaaatgtaagtggacaggaggtagatacccatttcctacttggggcttggcataagataccaaaaattaaccaaaacgttttattttctagcatgcaaatcaagaggttccaatcttcgtgttcactttaaggtatgcgattcatagttgtgatccaacagttcctcatgttccactcaaaaaaggtagctgcagtgatgactttcttaggacacctttggatttaccgtgaaaattaataaattctgagcagccaccttatatttaggcattgatgatcagggtgtaaggatgtagcgtttgtgaaattgagaagtagtaccagaaaaccatttgaaaacctagtgtgcagatcaagatggggcattttaattgtaattacatgatgatggaatttaaacgttttatagtgaataaatggagttttggagttttctctagcttcaacgaagtttacctggcttttagtcacaagtttttttaattgccttgcccccaaagaatagaaataactcgacattttgaaaagctgaaaattgaaaatttaacgtttactttaaaaattaaagctttgatctagttaaccaacactttattcttcatacttagaacactcgtgaaactgctcaggccatcaagggtatgcatatacgaaaagccacgaagtatctgaaagatgtcactttacagaaacagtgtgtaccattccgacgttacaatggtggagttggcaggtgtgcgcaggccaagcaatggggctggacacaaggtcggtggcccaaaaagagtgctgaatttttgctgcacatgcttaaaaacgcagagagtaatgctgaacttaaggtacccaaaccactaacatcctgtgcaacttgggtggttgtttaattaatgttggctgttcagatttatgtccttgattttcttgttttcagtaattaactcttaggattttttaaatttctacctgcagtttccacagaatgaaactatttccttttattttttttgagtccctttatggcaaaattctgtgaagatccagaagcgtgctctgtggtctctttaagcctaacacttagtatttctagttttctgctgtctttttacactggaggtactttaccaggggcttttacccctttttgtgacatacacctttggtagtatgattaattatcaaaatgattgccttagcagtgattaatgtggtttgtggcctaccttcataatggagagtcatgttgcatttcagaaagaaattgtttaaaatttcaaaaagtttaaacaatgacaaacttgtgttgacaaaacacaaatttctccattttgtatattacccattagccttttgcatttgaaggtctgggccagaactggaattagtttaggtctgtatggctccaaaccttctaagccatgctgagaaattttatcatcaagacttcgaattgggttcttccttacccctcagctctccacccgtctaaggatctttgggaaggcca

SEQ ID NO: 8447 - protein, 81 aa, Homo sapiens [sequence omitted]

SEQ ID NO: 8448 - DNA, 2191 bp, Homo sapiens
tgtctgggaagcacatcgcagtgtgcaccgcagcagggcttgatccaccacatcacattccgcgctcgctgctgcctgaactcatcaaagtggacccagtgaaagctgtgttgaggaggactattctggtgctgaggctgggtacattcatgaggccaggaacacgggattgaattccaagcagagcaccaggatacctgtagcagaaatccaggcaagagccaagaagatgggaacggaatagcaagcgctgaattaattaattaattaattaattttttgagatggagtcttgctctgtcgcccaggctggagtgcagtggtgtaatgttggctcactgcaacctccccctccggggttcaagcgattctcctgcctcagcctcccaagtagctaggattacaggtgcccgccaccatgctcggctaattttttgtatttttagtagagacgaggtttcgccatgttggccaggctggtctggaactcctgacctcaagtgattggccggccttgggcaagtgctgaatttaaacacggctctcctgaggacttctattgggttctgcctagtggtaaccgccgaggcttcgcttactctgtagatctcccgggagcagcaggaaacaagaaacccttagccttttcaaagtaatagccattctcctcactgacctgacaaagacggatgtcaagtgggccctgcaggagtttgacagtttgtccaaacaactgtttttagttgaggctataaattcttaggaaagggtttgtcagtgtggcacattaaatcagttggccagtatgcattactctgaccatcttcttagaaagcaacgtctttggggattttcagatgagtgaatattcaatgctctgtcttttagcattatcatccacttcccctgcccctcatagaattctctttagaggattggctcctgggcctccaggagagcgggcagtagggtagggtggtgggaggagaggaaagtcttaatcccttgccagggatttactttgttcttctcagtcggagcctcccgtacaatgctgttttgagcttcacttagaaattggctttattagctaggaaaggggaattcttttcacaacaatcggaaaatgtaatcccttagtcaggcggctggagtcctttaattcacctctccggaccttgggctgctggctgctcctctctgccgcctggctgtctctcccttacctcccagagttagggtaatagctgacatttttcttcactaggctttcctaagggatttcattccatttgtgagacactttaattcctgaagctgcaaagtttgctttttattactatagctctacttattctgcataattttatttattatttgtttatgtatttattttttgagacagagtctcgctgtgttgcccaggctggagtgcagtggcgccatctcagctcactgcaacctctgcctcctgggttcaagcaattctccttcctcagtctcctgagcagctgggactacaggcacgtgctaccacgcccagctaagttttgtatttttagtagagacgaggtttcatcatattggccaggctggtctcgaactcctgaccttgtgatccacctgcctcagcctcccaaagtgctgggattacaggcgtgagccaccacgcctggcttattctgcataatttttaagagttgtgaattgttttaagatcaaatttaaaagtacattttctttcttatcttgtcattaactgatgttgggtatgtgtgtgtgcttgtgatttccctggctggaccagtgtataacttcaaagagggctggtgccttgcctttagtctgctggatagcactcctccagaccctccctttgctgagcagctccgtggacctgtgcaaatctctacccagctttgttggacaacaaaataccctggagaatatcaagccctttaacatacccagtttgtgctcccagacgtaagatctctttggccatgtatgtgggattcccatgaaggagaagcttcatttccagcaagaatctggcttccacctagacttgggaaacagatactgaaaagcatattgctgatcaactagacaacctacttccactcttgattgcccctgtaatccatctagaacagccagagcaatttatttattaaaaaatttaaaattg

SEQ ID NO: 8449 - protein, 92 aa, Homo sapiens
MYLFFETESRCVAQAGVQWRHLSSLQPLPPGFKQFSFLSLLSSWDYRHVLPRPAKFCIFSRDEVSSYWPGWSRTPDLVIHLPQPPKVLGLQA

SEQ ID NO: 8450 - DNA, 2323 bp, Homo sapiens
aatgaggcgaggtcggaacaggatctgctggctccggctcggtttcctcgcacaggtctctccagctggatcctcgacgctagggaggaaggggcgcgggactgctgtgggggttttccctccccaggcaggggcaggacctgttccgggcgactgcagggttaagggtatcgtcttaaagagccggatcctcccggctggagcgaggctggatggcgggacgcagcctctcagcctctcgtacccgccctgcgtccgcagtggttgttggcgcagccgccccgtcggtgttccgggctcagtccccgctccccagcgccagacgcagactccgggccaagttctccctccgctcgctgctttctgccgcaggacccggatcaataaagggaaggagagccgggaggaaatgatggagaacagagagaaaggagatgcttgatttcactcgccaaggagtgagtgctcatcggcagacactgggctctggccacgcgtcttagactccaaatctcggctcactggtccctttgaggaggtcgcctggtgttcccgtagccctccaccccaccgtaggagagcgcctgccacgagctccgcgcctcgctaagtgctttgctacgtgaactcttagttttcccaacatccctaagccgccgatacattatcacccacgtattgcggacgagagaaccgcctcggagaagctggctggctcgcttggagttttgcagctagtggcggagcgagcattccgagcaggtactgtgcgatcctccagcgccggccgcagctcacagccccttagctccgccgggttattgtgcggccgcgccttctgcacctgttgcggccctcgctaggcgggaagggagggagaagaggaggacaaaggggatgaccaggtggctctcccccgacggactcccggcccagggagcggatagaccactcccagagagagtgtggctttgagccttggagaggatgctctccttctccagggatcgcctccccagcggacgcagagtttcagggaaatgtccgcctccgccacttgggatggcagtggggagaggaggatctgggtgtccggaggagggcagtgggagaaagctggagctgctggagtcgcagctgcctgcggagcgggcccgggaggaagcggggccgagcgtgcggcgtccacgcgataagctccacaaacccaaagctacacagactgaggtcaaaccatctgtgaggtttaacctccgcacctccaaggacccagagcatgaaggatgctacctctccgtcggccacagccagcccttagaagactgcagtttcaacatgacagctaaaacctttttcatcattcacggatggacgatgagcggtatctttgaaaactggctgcacaaactcgtgtcagccctgcacacaagagagaaagacgccaatgtagttgtggttgactggctccccctggcccaccagctttacacggatgcggtcaataataccagggtggtgggacacagcattgccaggatgctcgactggctgcaggagaaggacgatttttctctcgggaatgtccacttgatcggctacagcctcggagcgcacgtggccgggtatgcaggcaacttcgtgaaaggaacggtgggccgaatcacaggtttggatcctgccgggcccatgtttgaaggggccgacatccacaagaggctctctccggacgatgcagattttgtggatgtcctccacacctacacgcgttccttcggcttgagcattggtattcagatgcctgtgggccacattgacatctaccccaatgggggtgacttccagccaggctgtggactcaacgatgtcttgggatcaattgcatatggaacaatcacagaggtggtaaaatgtgagcatgagcgagccgtccacctctttgttgactctctggtgaatcaggacaagccgagttttgccttccagtgcactgactccaatcgcttcaaaaaggggatctgtctgagctgccgcaagaaccgttgtaatagcattggctacaatgccaagaaaatgaggaacaagaggaacagcaaaatgtacctaaaaacccgggcaggcatgcctttcagaggtaaccttcagtccctggagtgtccctgaggaaggcccttaatacctccttcttaataccatgctgcagagcagggcacatcctagcccaggagaagtggccagcacaatccaatcaaatcgttgcaaatcagattacactgtgcatgtcctaggaaagggaatctttacaaaataaacagtgtggacccct

SEQ ID NO: 8451 - protein, 390 aa, Homo sapiens
MLSFSRDRLPSGRRVSGKCPPPPLGMAVGRGGSGCPEEGSGRKLELLESQLPAERAREEAGPSVRRPRDKLHKPKATQTEVKPSVRFNLRTSKDPEHEGCYLSVGHSQPLEDCSFNMTAKTFFIIHGWTMSGIFENWLHKLVSALHTREKDANVVVVDWLPLAHQLYTDAVNNTRVVGHSIARMLDWLQEKDDFSLGNVHLIGYSLGAHVAGYAGNFVKGTVGRITGLDPAGPMFEGADIHKRLSPDDADFVDVLHTYTRSFGLSIGIQMPVGHIDIYPNGGDFQPGCGLNDVLGSIAYGTITEVVKCEHERAVHLFVDSLVNQDKPSFAFQCTDSNRFKKGICLSCRKNRCNSIGYNAKKMRNKRNSKMYLKTRAGMPFRGNLQSLECP

SEQ ID NO: 8452 - DNA, 856 bp, Homo sapiens
gtgacagcagcgagtccttgcctcccggcggctcaggacgagggcagatctcgttctggggcaagccgttgacactcgctccctgccaccgcccgggctccgtgccgccaagttttcattttccaccttctctgcctccagtcccccagcccctggccgagagaagggtcttaccggccgggattgctggaaacaccaagaggtggtttttgttttttaaaacttctgtttcttgggagggggtgtggcggggcaggatgagcaactccgttcctctgctctgtttctggagcctctgctattgctttgctgcggggagccccgtaccttttggtccagagggacggctggaagataagctccacaaacccaaagctacacagactgaggtcaaaccatctgtgaggtttaacctccgcacctccaaggacccagagcatgaaggatgctacctctccgtcggccacagccagcccttagaagactgcagtttcaacatgacagctaaaacctttttcatcattcacggatggacgatgagcggtatctttgaaaactggctgcacaaactcgtgtcagccctgcacacaagagagaaagacgccaatgtagttgtggttgactggctccccctggcccaccagctttacacggatgcggtcaataataccagggtggtgggacacagcattgccaggatgctcgactggctgcaggtactgggggatgagagggagtctcctgtcaccagcaggatctcaaacccaatcttcttaagaaatgcaggtcatgcatctgttgccatgaacttctggagtctgataaaaatctttgagattaaaagttttattgaatt

SEQ ID NO: 8453 - protein, 198 aa, Homo sapiens
MSNSVPLLCFWSLCYCFAAGSPVPFGPEGRLEDKLHKPKATQTEVKPSVRFNLRTSKDPEHEGCYLSVGHSQPLEDCSFNMTAKTFFIIHGWTMSGIFENWLHKLVSALHTREKDANVVVVDWLPLAHQLYTDAVNNTRVVGHSIARMLDWLQVLGDERESPVTSRISNPIFLRNAGHASVAMNFWSLIKIFEIKSFI

SEQ ID NO: 8454 - DNA, 1485 bp, Homo sapiens
gtgacagcagcgagtccttgcctcccggcggctcaggacgagggcagatctcgttctggggcaagccgttgacactcgctccctgccaccgcccgggctccgtgccgccaagttttcattttccaccttctctgcctccagtcccccagcccctggccgagagaagggtcttaccggccgggattgctggaaacaccaagaggtggtttttgttttttaaaacttctgtttcttgggagggggtgtggcggggcaggatgagcaactccgttcctctgctctgtttctggagcctctgctattgctttgctgcggggagccccgtaccttttggtccagagggacggctggaagataagctccacaaacccaaagctacacagactgaggtcaaaccatctgtgaggtttaacctccgcacctccaaggacccagagcatgaaggatgctacctctccgtcggccacagccagcccttagaagactgcagtttcaacatgacagctaaaacctttttcatcattcacggatggacgatgagcggtatctttgaaaactggctgcacaaactcgtgtcagccctgcacacaagagagaaagacgccaatgtagttgtggttgactggctccccctggcccaccagctttacacggatgcggtcaataataccagggtggtgggacacagcattgccaggatgctcgactggctgcaggagaaggacgatttttctctcgggaatgtccacttgatcggctacagcctcggagcgcacgtggccgggtatgcaggcaacttcgtgaaaggaacggtgggccgaatcacaggtttggatcctgccgggcccatgtttgaaggggccgacatccacaagaggctctctccggacgatgcagattttgtggatgtcctccacacctacacgcgttccttcggcttgagcattggtattcagatgcctgtgggccacattgacatctaccccaatgggggtgacttccagccaggctgtggactcaacgatgtcttgggatcaattgcatatggaacaatcacagaggtggtaaaatgtgagcatgagcgagccgtccacctctttgttgactctctggtgaatcaggacaagccgagttttgccttccagtgcactgactccaatcgcttcaaaaaggggatctgtctgagctgccgcaagaaccgttgtaatagcattggctacaatgccaagaaaatgaggaacaagaggaacagcaaaatgtacctaaaaacccgggcaggcatgcctttcagaggtaaccttcagtccctggagtgtccctgaggaaggcccttaatacctccttcttaataccatgctgcagagcagggcacatcctagcccaggagaagtggccagcacaatccaatcaaatcgttgcaaatcagattacactgtgcatgtcctaggaaagggaatctttacaaaataaacagtgtggacccct

SEQ ID NO: 8455 - protein, 354 aa, Homo sapiens
MSNSVPLLCFWSLCYCFAAGSPVPFGPEGRLEDKLHKPKATQTEVKPSVRFNLRTSKDPEHEGCYLSVGHSQPLEDCSFNMTAKTFFIIHGWTMSGIFENWLHKLVSALHTREKDANVVVVDWLPLAHQLYTDAVNNTRVVGHSIARMLDWLQEKDDFSLGNVHLIGYSLGAHVAGYAGNFVKGTVGRITGLDPAGPMFEGADIHKRLSPDDADFVDVLHTYTRSFGLSIGIQMPVGHIDIYPNGGDFQPGCGLNDVLGSIAYGTITEVVKCEHERAVHLFVDSLVNQDKPSFAFQCTDSNRFKKGICLSCRKNRCNSIGYNAKKMRNKRNSKMYLKTRAGMPFRGNLQSLECP

SEQ ID NO: 8456 - DNA, 4151 bp, Homo sapiens
gtgacagcagcgagtccttgcctcccggcggctcaggacgagggcagatctcgttctggggcaagccgttgacactcgctccctgccaccgcccgggctccgtgccgccaagttttcattttccaccttctctgcctccagtcccccagcccctggccgagagaagggtcttaccggccgggattgctggaaacaccaagaggtggtttttgttttttaaaacttctgtttcttgggagggggtgtggcggggcaggatgagcaactccgttcctctgctctgtttctggagcctctgctattgctttgctgcggggagccccgtaccttttggtccagagggacggctggaagataagctccacaaacccaaagctacacagactgaggtcaaaccatctgtgaggtttaacctccgcacctccaaggacccagagcatgaaggatgctacctctccgtcggccacagccagcccttagaagactgcagtttcaacatgacagctaaaacctttttcatcattcacggatggacgatgagcggtatctttgaaaactggctgcacaaactcgtgtcagccctgcacacaagagagaaagacgccaatgtagttgtggttgactggctccccctggcccaccagctttacacggatgcggtcaataataccagggtggtgggacacagcattgccaggatgctcgactggctgcaggagaaggacgatttttctctcgggaatgtccacttgatcggctacagcctcggagcgcacgtggccgggtatgcaggcaacttcgtgaaaggaacggtgggccgaatcacaggtttggatcctgccgggcccatgtttgaaggggccgacatccacaagaggctctctccggacgatgcagattttgtggatgtcctccacacctacacgcgttccttcggcttgagcattggtattcagatgcctgtgggccacattgacatctaccccaatgggggtgacttccagccaggctgtggactcaacgatgtcttgggatcaattgcatatggaacaatcacagaggtggtaaaatgtgagcatgagcgagccgtccacctctttgttgactctctggtgaatcaggacaagccgagttttgccttccagtgcactgactccaatcgcttcaaaaaggggatctgtctgagctgccgcaagaaccgttgtaatagcattggctacaatgccaagaaaatgaggaacaagaggaacagcaaaatgtacctaaaaacccgggcaggcatgcctttcagagtttaccattatcagatgaaaatccatgtcttcagttacaagaacatgggagaaattgagcccaccttttacgtcaccctttatggcactaatgcagattcccagactctgccactggaaatagtggagcggatcgagcagaatgccaccaacaccttcctggtctacaccgaggaggacttgggagacctcttgaagatccagctcacctgggagggggcctctcagtcttggtacaacctgtggaaggagtttcgcagctacctgtctcaaccccgcaaccccggacgggagctgaatatcaggcgcatccgggtgaagtctggggaaacccagcggaaactgacattttgtacagaagaccctgagaacaccagcatatccccaggccgggagctctggtttcgcaagtgtcgggatggctggaggatgaaaaacgaaaccagtcccactgtggagcttccctgagggtgcccgggcaagtcttgccagcaaggcagcaagacttcctgctatccaagcccatggaggaaagttactgctgaggacccacccaatggaaggattcttctcagccttgaccctggagcactgggaacaactggtctcctgtgatggctgggactcctcgcgggaggggactgcgctgctatagctcttgctgcctctcttgaatagctctaactccaaacctctgtccacacctccagagcaccaagtccagatttgtgtgtaagcagctgggtgcctggggcctctcgtgcacactggattggtttctcagttgctgggcgagcctgtactctgcctgacgaggaacgctggctccgaagaggccctgtgtagaaggctgtcagctgctcagcctgctttgagcctcagtgagaagtccttccgacaggagctgactcatgtcaggatggcaggcctggtatcttgctcgggccctagctgttggggttctcatgggttgcactgaccatactgcttacgtcttagccattccgtcctgctccccagctcactctctgaagcacacatcattggctttcctatttttctgttcattttttaattgagcaaatgtctattgaacacttaaaattaattagaatgtggtaatggacatattactgagcctctccatttggaacccagtggagttgggatttctagaccctctttctgtttggatggtgtatgtgtatatgcatggggaaaggcacctggggcctgggggaggctataggatataagcattagggaccctgaggctttaagtggtttctatttcttcttagttattatgtgccaccttcttagttattatgtgccacctcccctatgagtgacgtgtttgatcactagcagaatagcaagcagagtatcattcatgctggggccagaatgatggccggttgccagatataactgctttggagcaaatctcttctgtttagagagatagaagttatgacatatgtaatacacatctgtgtacacagaaaccggcacctgccagacagagctggttctaagatttaatacagtgctttttttcctctttgaaatattttactttaataccagtgccttttcttgttgaacttcttggaaaagccaccaattctagatcttgatttgaattaatacacacaatatctgagacacttacacttttcaaaagatttgtgtatgcattgcctaattagagtagggggagaagggcaactattattatccctattttacaaaactgaggcttagtgaggttcagccacatgcctagacttatatactagttagtggtgcagccagggagaggactcagatttcctggaggcaaagtctatctctgaaactccatgaagacttttgcagccagttcccaccaatatgccccagacgtgagacaaacaaggacttttttttttatatagagccatccataaaatcctaagcccttttattaatgtataaccaggagaacatctgtgccaacggttggactttttatggctgagattcgggaggaagtgtgacaccaagcaggagaggaagaatgattttctttgtacttaggttttctaaggacattgttttaatctgtatcgtgccaaagttgtatcactgttaaacttctgaagacataaccagttgagtcttatttcaagatatgttctcaagccaattgtgtgcttctcttgtttctgtgattgctttctagccaaagcgaagcttgtacaggttgagtatcccttatccaaaatgcttggaaccagaagtgtttcaaattttagattattttcagattttggaatgtttgcatatacataatgagatattttgggaataggacccgagcctaaacacaaaattcattgatgtgtcagttacaccttatccacatagcctgagggtaattttatacgatattttaaatagttgtgtacatgaagcatggtttgtggtaacttatgtgaggggttttcccattttttgtcttgttggtgctcaaaaagttttggattttggagcatttcggattttggatttttggattagggttgctcaacccatattattggctgtacatcctggtcacttctgacttctgtttttactaatggaagctttgcaaattgaattctcagtgagttgtatatttatacacctggcttgaagccttaattgtatataatgatgctttttaaaaaatgctatttggaagactatttatttctcgtgtatataatgtatataaaaaaatatggttagtgtttacctaaggttaaccaatttcaagattaaaatttttaaatagtaaaataataaaaaattataaagttcttaatggtc

SEQ ID NO: 8457 - protein, 500 aa, Homo sapiens; identical to SEQ ID NO: 1178

SEQ ID NO: 8458 - DNA, 1078 bp, Homo sapiens
actgacattttgtacagaagaccctgagaacaccagcatatccccaggccgggagctctggtttcgcaagtgtcgggatggctggaggatgaaaaacgaaaccagtcccactgtggagcttccctgagggtgcccgggcaagtcttgccagcaaggcagcaagacttcctgctatccaagcccttttattaatgtataaccaggagaacatctgtgccaacggttggactttttatggctgagattcgggaggaagtgtgacaccaagcaggagaggaagaatgattttctttgtacttaggttttctaaggacattgttttaatctgtatcgtgccaaagttgtatcactgttaaacttctgaagacataaccagttgagtcttatttcaagatatgttctcaagccaattgtgtgcttctcttgtttctgtgattgctttctagccaaagcgaagcttgtacaggttgagtatcccttatccaaaatgcttggaaccagaagtgtttcaaattttagattattttcagattttggaatgtttgcatatacataatgagatattttgggaataggacccgagcctaaacacaaaattcattgatgtgtcagttacaccttatccacatagcctgagggtaattttatacgatattttaaatagttgtgtacatgaagcatggtttgtggtaacttatgtgaggggttttcccattttttgtcttgttggtgctcaaaaagttttggattttggagcatttcggattttggatttttggattagggttgctcaacccatattattggctgtacatcctggtcacttctgacttctgtttttactaatggaagctttgcaaattgaattctcagtgagttgtatatttatacacctggcttgaagccttaattgtatataatgatgctttttaaaaaatgctatttggaagactatttatttctcgtgtatataatgtatataaaaaaatatggttagtgtttacctaaggttaaccaatttcaagattaaaatttttaaatagtaaaataataaaaaattataaagttcttaatggtc

SEQ ID NO: 8459 - protein, 34 aa, Homo sapiens
MVCGNLCEGFSHFLSCWCSKSFGFWSISDFGFLD

SEQ ID NO: 8460 - DNA, 2146 bp, Homo sapiens
gaaataactaatagaacaaaggaaatctatttaacttgatagcgaaggggtaggcacaggtgtgatttcctctatgataatctctcacacaggaaaccatgatttcagacaaatggtttatctttaaatctcttccacttttagcagatcacagttcagagcctcaaagaggctgtttaatttattatatttgtgtcagcaaataggtaccactaaatttctcactttagacctcacatttaaaactattaaactatatcaactttgggaagttgttcataatcatttggaaatgtatacattctcaaggacataactcagaccatagttttcctaggttcaaaagcctagtttcactacctattctaggtctcttagtacctccttgaagatggctctgtatatagagtagaaagataatggtggatctaagcacatatgaggcaccatcttgagagaccacaaagtatagtaggaaagagcacaagactgaattttatcccaactctgcaaaagttacctttcttagaatgagtttccttatctataaaattcctgaattaagatcatatgataatacagtactgtaaacttgaagtaaggtaattgccagtttgtgtaagtataacataatatacttttcagttctgccacatttcaacatagtaactgttccctttatgtacgtggctttgaaggtttattctttgttgtgtgtcagcttcttggaaggatagctcctagtactgcataataataataatacttgcaaccacttattgagtacttgccatgtttcaggtaacacactggacacttaatactcatgattttatctaactgtgacagtgactcttagcatgataccacagtcacattttcacacgcggaaacgtgaatttaaagagtttaaagaatatgcataaggtcacaccctaacaaatggtatagccaatatttgaaccatccatccagttctaaaacctgtgggctttctacagtatcccactgtgtctggtatgtgtcaatttatgggattactgagaattgcctctaagggatgcatttgactaaaagtattatttagtaaatatacacattttaaacctgatagctttatgcagaatgattgtagataaaataactttgcgaggtaatttaaataggaagaaacagcagacttagctgttgataggactggaccattctcatttaaaaattagtttgtgagtaaggatttttgttagtgctctaatttttgttttaaggtgaatgaagcttttgctccccagtacttggctgttgagaggagtttggatcttgacataagtaaaaccaatgtgaatggaggagccattgctttgggtcacccactgggaggatctggatcaagaattactgcacacctggttcacgaattaaggcgtcgaggtggaaaatatgccgttggatcagcttgcattggaggtggccaaggtattgctgtcatcattcagagcacagcctgaagagaccagtgagctcactgtgacccatccttactctacttggccaggccacagtaaaacaagtgaccttcagagcagctgccacaactggccatgccctgccattgaaacagtgattaagtttgatcaagccatggtgacacaaaaatgcattgatcatgaataggagcccatgctagaagtacattctctcagatttgaaccagtgaaatatgatgtatttctgagctaaaactcaactatagaagacattaaaagaaatcgtattcttgccaagtaaccaccacttctgccttagataatatgattataaggaaatcaaataaatgttgccttaacttcagttaatattttcctgtcatttatatttttaaaaattttaaattgtgataagatacacattacataaactttaccatcttaacccttttttagcgtacaattcactggtattaagtacattcacatttttatacaaacatccccactttttatcaacagaactttttcagtcaccacacatggaaacaataactcctgattctcccatcccccatcccctgacaaccaccagtgtattttgtttctataaatttgatgactcgaggtacctcataagtgaaattataaatatctgt

SEQ ID NO: 8461 - protein, 77 aa, Homo sapiens [sequence omitted]

SEQ ID NO: 8462 - DNA, 2252 bp, Homo sapiens
cctcagcccttggctcctgcccagtgtttagggtgttggcggagacaaaggggaagagtcatcgcctgtcggggctaggatatgatgggtgagaggtgtcaaaccaaattctctcggtttggaaacggagaaaatctaaaaatgaggatgtgaggaaagagtccgctctcaaggcgcgttgtggtctatccgagccccgtcccctgggctccctcgggctggggtgaggcgggcagcgctacgcgtggggtaggaccatcttacgctgggaccccgccaaggagccccaggaagtaggtgaaagggcaggggcgtggctctcggggcgccacccacgctcttgaaatctgggtgattgcgagcggccgctcagcgtcccccacaccacagacccgcgccgccgacgacccagcagccgccatggctctgctccgaggtgtgtttgtagttgctgctaagcgaacgccctttggagcttacggaggccttctgaaagacttcactgctactgacttgtctgaatttgctgccaaggctgccttgtctgctggcaaagtctcacctgaaacagttgacagtgtgattatgggcaatgtcctgcagagttcttcagatgctatatatttggcaaggcatgttggtttgcgtgtgggaatcccaaaggagaccccagctctcacgattaataggctctgtggttctggttttcagtccattgtgaatggatgtcaggaaatttgtgttaaagaagctgaagttgttttatgtggaggaaccgaaagcatgagccaagctccctactgtgtcagaaatgtgcgttttggaaccaagcttggatcagatatcaagctggaagattctttatgggtatcattaacagatcagcatgtccagctccccatggcaatgactgcagagaatcttgctgtaaaacacaaaataagcagagaagaatgtgacaaatatgccctgcagtcacagcagagatggaaagctgctaatgatgctggctactttaatgatgaaatggcaccaattgaagtgaagacaaagaaaggaaaacagacaatgcaggtagacgagcatgctcggccccaaaccaccctggaacagttacagaaacttcctccagtattcaagaaagatggaactgttactgcagggaatgcatcgggtgtagctgatggtgctggagctgttatcatagctagtgaagatgctgttaagaaacataacttcacaccactggcaagaattgtgggctactttgtatctggatgtgatccctctatcatgggtattggtcctgtccctgctatcagtggggcactgaagaaagcaggactgagtcttaaggacatggatttggtagaggtgaatgaagcttttgctccccagtacttggctgttgagaggagtttggatcttgacataagtaaaaccaatgtgaatggaggagccattgctttgggtcacccactgggaggatctggatcaagaattactgcacacctggttcacgaattaaggcgtcgaggtggaaaatatgccgttggatcagcttgcattggaggtggccaaggtattgctgtcatcattcagagcacagcctgaagagaccagtgagctcactgtgacccatccttactctacttggccaggccacagtaaaacaagtgaccttcagagcagctgccacaactggccatgccctgccattgaaacagtgattaagtttgatcaagccatggtgacacaaaaatgcattgatcatgaataggagcccatgctagaagtacattctctcagatttgaaccagtgaaatatgatgtatttctgagctaaaactcaactatagaagacattaaaagaaatcgtattcttgccaagtaaccaccacttctgccttagataatatgattataaggaaatcaaataaatgttgccttaacttcagttaatattttcctgtcatttatatttttaaaaattttaaattgtgataagatacacattacataaactttaccatcttaacccttttttagcgtacaattcactggtattaagtacattcacatttttatacaaacatccccactttttatcaacagaactttttcagtcaccacacatggaaacaataactcctgattctcccatcccccatcccctgacaaccaccagtgtattttgtttctataaatttgatgactcgaggtacctcataagtgaaattataaatatctgt

SEQ ID NO: 8463 - protein, 397 aa, Homo sapiens
MALLRGVFVVAAKRTPFGAYGGLLKDFTATDLSEFAAKAALSAGKVSPETVDSVIMGNVLQSSSDAIYLARHVGLRVGIPKETPALTINRLCGSGFQSIVNGCQEICVKEAEVVLCGGTESMSQAPYCVRNVRFGTKLGSDIKLEDSLWVSLTDQHVQLPMAMTAENLAVKHKISREECDKYALQSQQRWKAANDAGYFNDEMAPIEVKTKKGKQTMQVDEHARPQTTLEQLQKLPPVFKKDGTVTAGNASGVADGAGAVIIASEDAVKKHNFTPLARIVGYFVSGCDPSIMGIGPVPAISGALKKAGLSLKDMDLVEVNEAFAPQYLAVERSLDLDISKTNVNGGAIALGHPLGGSGSRITAHLVHELRRRGGKYAVGSACIGGGQGIAVIIQSTA

SEQ ID NO: 8464 - DNA, 1850 bp, Homo sapiens
gaaataactaatagaacaaaggaaatctatttaacttgatagcgaaggggtaggcacaggtgtgatttcctctatgataatctctcacacaggaaaccatgatttcagacaaatggtttatctttaaatctcttccacttttagcagatcacagttcagagcctcaaagaggctgtttaatttattatatttgtgtcagcaaataggtaccactaaatttctcactttagacctcacatttaaaactattaaactatatcaactttgggaagttgttcataatcatttggaaatgtatacattctcaaggacataactcagaccatagttttcctaggttcaaaagcctagtttcactacctattctaggtctcttagtacctccttgaagatggctctgtatatagagtagaaagataatggtggatctaagcacatatgaggcaccatcttgagagaccacaaagtatagtaggaaagagcacaagactgaattttatcccaactctgcaaaagttacctttcttagaatgagtttccttatctataaaattcctgaattaagatcatatgataatacagtactgtaaacttgaagtaaggtaattgccagtttgtgtaagtataacataatatacttttcagttctgccacatttcaacatagtaactgttccctttatgtacgtggctttgaaggtttattctttgttgtgtgtcagcttcttggaaggatagctcctagtactgcataataataataatacttgcaaccacttattgagtacttgccatgtttcaggtaacacactggacacttaatactcatgattttatctaactgtgacagtgactcttagcatgataccacagtcacattttcacacgcggaaacgtgaatttaaagagtttaaagaatatgcataaggtcacaccctaacaaatggtatagccaatatttgaaccatccatccagttctaaaacctgtgggctttctacagtatcccactgtgtctggtatgtgtcaatttatgggattactgagaattgcctctaagggatgcatttgactaaaagtattatttagtaaatatacacattttaaacctgatagctttatgcagaatgattgtagataaaataactttgcgaggtaatttaaataggaagaaacagcagacttagctgttgataggactggaccattctcatttaaaaattagtttgtgagtaaggatttttgttagtgctctaatttttgttttaaggtgaatgaagcttttgctccccagtacttggctgttgagaggagtttggatcttgacataagtaaaaccaatgtgaatggaggagccattgctttgggtcacccactgggaggatctggatcaagaattactgcacacctggttcacgaattaaggcgtcgaggtggaaaatatgccgttggatcagcttgcattggaggtggccaaggtattgctgtcatcattcagagcacagcctgaagagaccagtgagctcactgtgacccatccttactctacttggccaggccacagtaaaacaagtgaccttcagagcagctgccacaactggccatgccctgccattgaaacagtgattaagtttgatcaagccatggtgacacaaaaatgcattgatcatgaataggagcccatgctagaagtacattctctcagatttgaaccagtgaaatatgatgtatttctgagctaaaactcaactatagaagacattaaaagaaatcgtattcttgccaagtaaccaccacttctgccttagataatatgattataaggaaatcaaataaatgttgccttaacttc

SEQ ID NO: 8465 - protein, 77 aa, Homo sapiens [sequence omitted]

SEQ ID NO: 8466 - DNA, 1956 bp, Homo sapiens
cctcagcccttggctcctgcccagtgtttagggtgttggcggagacaaaggggaagagtcatcgcctgtcggggctaggatatgatgggtgagaggtgtcaaaccaaattctctcggtttggaaacggagaaaatctaaaaatgaggatgtgaggaaagagtccgctctcaaggcgcgttgtggtctatccgagccccgtcccctgggctccctcgggctggggtgaggcgggcagcgctacgcgtggggtaggaccatcttacgctgggaccccgccaaggagccccaggaagtaggtgaaagggcaggggcgtggctctcggggcgccacccacgctcttgaaatctgggtgattgcgagcggccgctcagcgtcccccacaccacagacccgcgccgccgacgacccagcagccgccatggctctgctccgaggtgtgtttgtagttgctgctaagcgaacgccctttggagcttacggaggccttctgaaagacttcactgctactgacttgtctgaatttgctgccaaggctgccttgtctgctggcaaagtctcacctgaaacagttgacagtgtgattatgggcaatgtcctgcagagttcttcagatgctatatatttggcaaggcatgttggtttgcgtgtgggaatcccaaaggagaccccagctctcacgattaataggctctgtggttctggttttcagtccattgtgaatggatgtcaggaaatttgtgttaaagaagctgaagttgttttatgtggaggaaccgaaagcatgagccaagctccctactgtgtcagaaatgtgcgttttggaaccaagcttggatcagatatcaagctggaagattctttatgggtatcattaacagatcagcatgtccagctccccatggcaatgactgcagagaatcttgctgtaaaacacaaaataagcagagaagaatgtgacaaatatgccctgcagtcacagcagagatggaaagctgctaatgatgctggctactttaatgatgaaatggcaccaattgaagtgaagacaaagaaaggaaaacagacaatgcaggtagacgagcatgctcggccccaaaccaccctggaacagttacagaaacttcctccagtattcaagaaagatggaactgttactgcagggaatgcatcgggtgtagctgatggtgctggagctgttatcatagctagtgaagatgctgttaagaaacataacttcacaccactggcaagaattgtgggctactttgtatctggatgtgatccctctatcatgggtattggtcctgtccctgctatcagtggggcactgaagaaagcaggactgagtcttaaggacatggatttggtagaggtgaatgaagcttttgctccccagtacttggctgttgagaggagtttggatcttgacataagtaaaaccaatgtgaatggaggagccattgctttgggtcacccactgggaggatctggatcaagaattactgcacacctggttcacgaattaaggcgtcgaggtggaaaatatgccgttggatcagcttgcattggaggtggccaaggtattgctgtcatcattcagagcacagcctgaagagaccagtgagctcactgtgacccatccttactctacttggccaggccacagtaaaacaagtgaccttcagagcagctgccacaactggccatgccctgccattgaaacagtgattaagtttgatcaagccatggtgacacaaaaatgcattgatcatgaataggagcccatgctagaagtacattctctcagatttgaaccagtgaaatatgatgtatttctgagctaaaactcaactatagaagacattaaaagaaatcgtattcttgccaagtaaccaccacttctgccttagataatatgattataaggaaatcaaataaatgttgccttaacttc

SEQ ID NO: 8467 - protein, 397 aa, Homo sapiens; identical to SEQ ID NO: 8463

SEQ ID NO: 8468 - DNA, 715 bp, Homo sapiens
gcccccagctggcggccgcggccgcccgcgcgccaagttcctcagcccttggctcctgcccagtgtttagggtgttggcggagacaaaggggaagagtcatcgcctgtcggggctaggatatgatgggtgagaggtgtcaaaccaaattctctcggtttggaaacggagaaaatctaaaaatgaggatgtgaggaaagagtccgctctcaaggtgtgtttgtagttgctgctaagcgaacgccctttggagcttacggaggccttctgaaagacttcactgctactgacttgtctgaatttgctgccaaggctgccttgtctgctggcaaagtctcacctgaaacagttgacagtgtgattatgggcaatgtcctgcagagttcttcagatgctatatatttggcaaggcatgttggtttgcgtgtgggaatcccaaaggagaccccagctctcacgattaataggctctgtggttctggttttcagtccattgtgaatggatgtcaggaaatttgtgttaaagaagctgaagttgttttatgtggaggaaccgaaagcatgagccaagctccctactgtgtcagaaatgtgcgttttggaaccaagcttggatcagatatcaagctggaagattctttatgggtatcattaacagatcagcatgtccagctccccatggcaatgactgcagagaatcttgctgtaaaacacaaa

SEQ ID NO: 8469 - protein, 117 aa, Homo sapiens
MGNVLQSSSDAIYLARHVGLRVGIPKETPALTINRLCGSGFQSIVNGCQEICVKEAEVVLCGGTESMSQAPYCVRNVRFGTKLGSDIKLEDSLWVSLTDQHVQLPMAMTAENLAVKH

SEQ ID NO: 8470 - DNA, 737 bp, Homo sapiens
cagctggcggccgcggccgcccgcgcgccaagttcctcagcccttggctcctgcccagtgtttagggtgttggcggagacaaaggggaagagtcatcgcctgtcggggctaggatatgatgggtgagaggtgtcaaaccaaattctctcggtttggaaacggagaaaatctaaaaatgaggatgtgaggaaagagtccgctctcaaggcgcgttgtggtctatccgagccccgtcccctgggctccctcgggctggggtgtgtttgtagttgctgctaagcgaacgccctttggagcttacggaggccttctgaaagacttcactgctactgacttgtctgaatttgctgccaaggctgccttgtctgctggcaaagtctcacctgaaacagttgacagtgtgattatgggcaatgtcctgcagagttcttcagatgctatatatttggcaaggcatgttggtttgcgtgtgggaatcccaaaggagaccccagctctcacgattaataggctctgtggttctggttttcagtccattgtgaatggatgtcaggaaatttgtgttaaagaagctgaagttgttttatgtggaggaaccgaaagcatgagccaagctccctactgtgtcagaaatgtgcgttttggaaccaagcttggatcagatatcaagctggaagattctttatgggtatcattaacagatcagcatgtccagctccccatggcaatgactgcag

SEQ ID NO: 8471 - protein, 109 aa, Homo sapiens
MGNVLQSSSDAIYLARHVGLRVGIPKETPALTINRLCGSGFQSIVNGCQEICVKEAEVVLCGGTESMSQAPYCVRNVRFGTKLGSDIKLEDSLWVSLTDQHVQLPMAMT

SEQ ID NO: 8472 - DNA, 772 bp, Homo sapiens
cagctggcggccgcggccgcccgcgcgccaagttcctcagcccttggctcctgcccagtgtttagggtgttggcggagacaaaggggaagagtcatcgcctgtcggggctaggatatgatgggtgagaggtgtcaaaccaaattctctcggtttggaaacggagaaaatctaaaaatgaggatgtgaggaaagagtccgctctcaaggcgcgttgtggtctatccgagccccgtcccctgggctccctcgggctggggtgtgtttgtagttgctgctaagcgaacgccctttggagcttacggaggccttctgaaagacttcactgctactgacttgtctgaatttgctgccaaggctgccttgtctgctggcaaagtctcacctgaaacagttgacagtgtgattatgggcaatgtcctgcagagttcttcagatgctatatatttggcaaggcatgttggtttgcgtgtgggaatcccaaaggagaccccagctctcacgattaataggctctgtggttctggttttcagtccattgtgaatggatgtcaggaaatttgtgttaaagaagctgaagttgttttatgtggaggaaccgaaagcatgagccaagctccctactgtgtcagaaatgtgcgttttggaaccaagcttggatcagatatcaagtttctcacctggcctttttggaagttgaaaggaatgggacttaagagaatctatgcggattttagccaccaaacacatttgagatatcttttatgaagacag

SEQ ID NO: 8473 - protein, 119 aa, Homo sapiens
MGNVLQSSSDAIYLARHVGLRVGIPKETPALTINRLCGSGFQSIVNGCQEICVKEAEVVLCGGTESMSQAPYCVRNVRFGTKLGSDIKFLTWPFWKLKGMGLKRIYADFSHQTHLRYLL

SEQ ID NO: 8474 - DNA, 1615 bp, Homo sapiens
agaggcttgggccgccgagctggacccggaccggttttggtgttctgagtcatgaagccctgcagagggagaggcgtgcactactgagttctctggtctgctgggcccagcacaacttccagggctctgcaggccatcaaatgaagtgctggttcttaggagagagatggcgtcaagccaactgcaaagaagcttttctaccagttctttaaggtcctggaagcagaggaagcagtgtgagaacagacatcagcccggcctgggatggtgggggtaaaatcctgcttgcagttggaggtgaccagtgcggcccatgggcagccgtcagaaatgcgccagtcagggacgctgccaggagagctgctcttcacaggctgttgccacctgctctggaactcaggaagtgggagatgatgagtcagagtccattctctcaaggcaagactcctcccaggtcaggctctctggcgccttgctgaatcccaagcctccccaagccaagcctcctccggttgccatgccaaccccccaggagacacactcagcctaggagtcccagggtggggcgggcagcgccctgggaaggaacggacaggtgtgagaatgcagggggcagggaggttggaagagcaagtgggcaagtgagattatccagggcccagcggcaaaacaggacactggtgtggccccagaccctagcagctgttgccactggaagcccatcagcccactgagacctagaacagcaagccgctgagggaggagtttgctgtcattaatgtcacctccatcccagctgagcagtggtcctctgtggccagggacacaaagaggagaagaggagccctgctccatccaccactagagccggcttcggtgactagagagtgacaggaagacagaagcgagtattccatggtggagcctctacaaacacattgggtgacaactttttaagatcagcctgttgacaggagttggcccagtcccagggatgtggccatcccaagctacacacctagttatagatgttgttaggaactttattcatcttgataaagaagcaaatctttaaaaatacttcttaaattgagaggcatctaaaaacccagcttaaatgacaggagaggcggcagaccgtaaaaccttattcagtgacctaagagtggcctctgcgtgagaggccagttggtagaaaggacccaggtgtctagagaaaattgagccaggaatctctgtggctaccgaaggtctcctgtgaaccctgagttctactcagactccgtctcccctgttaggtgccttgccaagcagcaccaaagcatgtgattccctggctccccagctccgctgcactgccacccctgcctcgtgttcatataaccctgtccagatccaaccccactgaatcctcggctacaactctgactcttgcaaaggattaaccaactcttggggccacaagacttggccagcccagtgaatggggagcccagggctgctccagactggatcgggaccaggacgctggtactatgaccaccatcagtccgaagctcctctgtacaatattatcaaatccacaagataaagcatttcttatgtcttttccacc

SEQ ID NO: 8475 - protein, 36 aa, Homo sapiens
MASSQLQRSFSTSSLRSWKQRKQCENRHQPGLGWWG

SEQ ID NO: 8476 - DNA, 492 bp, Homo sapiens
gaaaaagaataatgggccaggtgcagtggctcacgcctctaatgccagcactttgcgaggccgagtgctgggattacaggcgtgagccacggcgcccggcctatacatgagcatttgtgaagcttgtctaagatttgtacatttgattgcgtggatattttgccttaaaaagaactgtaaatgaataatgtgtgctgatgtgttcatgggtgtagagtactaaggtctgcattaaaaagataagatggtttgatggaagaacaggtggatagcaatatagcaaaatgttaacaattgggtcgatatgtgtccactgtacaagtcttcccacttttctgtaagtttgtaagttttcataatacaaatttggatttaaaaacaccccaacattgcaagagtgtcaccaaagtgtttgaaaagcaggattctagggggggcattcgctgacgactcagagaaaccgtccatgccacccaccacccctacgcactc

SEQ ID NO: 8477 - protein, 32 aa, Homo sapiens
MGQVQWLTPLMPALCEAECWDYRREPRRPAYT

SEQ ID NO: 8478 - DNA, 8192 bp, Homo sapiens
atgacaatagaagatacttcagtggaaacacatttttctgaaatggttgcactcaagatcgttggtggggcctccactaactgggggaattctctcatgctggtggtacctggacacccaggcacatacctgccgtgcacaagggtctggatccctgaccctgatgaggtatggcgctcagctgagttaaccaaggactacaaagaaggagacaagagcctacagctcagactggaggatgaaacgattctggaatacccaattgatgtacaacgcaaccagctgcccttcttacggaatccagatatcttggtgggagaaaatgacctgactgcccttagctatcttcatgagcctgcagttttgcataatttgaaggtccgtttcctggagtccaaccatatctacacttactgtggtatcgtacttgttgccattaatccttatgaacagttgccaatctatggacaagatgtcatctatacctacagtggccaaaacatgggagacatggacccccacatctttgctgtggcagaagaagcctacaagcagatggccagagatgagaagaatcagtccatcatagtcagtggggagtctggagccgggaagacggtatcagccaagtatgccatgcgctatttcgccaccgttggtggctcggccagtgaaaccaacatcgaagagaaggtgctggcatccagtcccatcatggaggccattggaaatgccaagaccacccgcaatgacaacagcagccgttttggcaagtacatccagattggctttgacaaaaggtaccacatcatcggggccaacatgaggacttacctcttggagaagtccagagtggtcttccaggcagatgatgagaggaattaccacatcttttaccagctctgtgctgctgccggtcttccagaatttaaagagcttgcactaacaagtgcagaggactttttctatacatcacagggaggagacacttccatcgagggtgtggacgatgctgaggactttgagaagactcgacaagccttcacactcctcggagtgaaagagtcccatcagatgagcatttttaagataattgcttctatcttgcaccttggaagtgtggcgattcaggctgagcgtgatggtgattcctgtagtatatcaccccaggatgtatacctaagcaacttctgccgactgctaggggtggagcacagtcagatggagcactggctgtgtcatcgcaagctggtcaccacctcggagacctacgtcaagaccatgtccctgcagcaggtgatcaatgcgcgcaacgccctggcgaagcacatctatgcccagttgttcggctggattgtggagcacatcaacaaggccctgcacacctccctcaagcagcactccttcatcggggtcctggacatctatgggtttgagacatttgaggtaaacagctttgagcagttctgtatcaactatgcaaatgaaaagctccagcagcagttcaactcgcatgttttcaaactggagcaagaagaatacatgaaggaacagatcccttggaccctgattgatttttatgataaccaaccttgtatcgacctcattgaagccaagctgggtatcttggacctgttggatgaagaatgtaaggtccccaaaggaactgaccagaactgggctcagaagctctatgaccggcactccagcagccagcacttccagaagccccgcatgtccaacacggccttcatcatcgtccactttgcagacaaggtggagtacctctctgatggttttctggagaaaaacagagacacggtgtatgaagagcagatcaatatcctgaaggccagcaagttcccactagtggctgacttgtttcatgatgacaaggaccctgttcctgccaccacccctgggaaggggtcatcttcgaagatcagcgtccgttctgccagaccccccatgaaagtctccaacaaggagcacaagaaaaccgttggccaccagttccgtacctccctgcatctgctcatggagaccctgaatgccacgacacctcactatgtccgctgcatcaagcccaacgatgagaagctcccctttcactttgacccaaagagagcagtgcagcaactcagagcctgcggggtgttggagacgattcgaatcagtgcagctggctacccatccaggtgggcctaccatgactttttcaaccggtatcgggtgctggtcaagaagagagagctcgccaacacagacaaaaaggccatctgcaggtctgtcctggagaacctcatcaaggaccccgacaagttccagtttggccgcaccaagatcttctttcgagcaggccaggtggcctacctggagaagctgcgggctgacaagttccggacagccaccatcatgatccagaaaactgtccggggatggctgcagaaggtgaaatatcacaggctgaagggggctaccttaaccctgcagaggtactgccggggacacctggcccgcaggctggctgagcacctgcggaggatcagagcggctgtggtgctccagaaacattaccgcatgcagagggcccgccaggcctaccagagggtccgcagagctgccgttgttatccaggccttcacccgggccatgtttgtgcggagaacctaccgccaggtcctcatggagcacaaggccaccaccatccagaagcacgtgcggggctggatggcacgcaggcacttccagcggctgcgggatgcagccattgtcatccagtgtgccttccggatgctcaaggccaggcgggagctgaaggccctcaggattgaggcccgctcagcagagcatctgaaacgtctcaacgtgggcatggagaacaaggtggtccagctgcagcggaagatcgatgagcagaacaaagagttcaagacactttcagagcagttgtccgtgaccacctcaacatacaccatggaggtagagcggctgaagaaggagctggtgcactaccagcagagcccaggtgaggacaccagcctcaggctgcaggaggaggtggagagcctgcgcacagagctgcagagggcccactcggagcgcaagatcttggaggacgcccacagcagggagaaagatgagctgaggaagcgagttgcagacctggagcaagaaaatgctctcttgaaagatgagaaagaacagctcaacaaccaaatcctgtgccagtctaaagatgaatttgcccagaactctgtgaaggaaaatctcatgaagaaagaactggaggaggagcgatcccggtaccagaaccttgtgaaggaatattcacagttggagcagagatacgacaaccttcgggatgaaatgaccatcataaagcaaactccaggtcataggcggaacccatcaaaccaaagtagcttagaatctgactccaattacccctccatctccacatctgagatcggagacactgaggatgccctccagcaggtggaggaaattggcctggagaaggcagccatggacatgacggtcttcctgaagctgcagaagagagtacgggagctggagcaggagaggaaaaagctgcaagtgcagctggagaagagagaacagcaggacagcaagaaagtccaggcggaaccaccacagactgacatagatttggacccgaatgcagatctggcctacaatagtctgaagaggcaagagctggagtcagagaacaaaaagctgaagaatgacctgaatgagctgaggaaagccgtggccgaccaagccacgcagaataactccagccacggctccccagatagctacagcctcctgctgaaccagctcaagctggcccacgaggagctcgaggtgcgcaaggaggaggtgctcatcctcaggacccagatcgtgagcgccgaccagcggcgactcgccggcaggaacgcggagccgaacattaatgccagatcaagttggcctaacagtgaaaagcatgttgaccaggaggatgccattgaggcctatcacggggtctgccagacaaacagcaagactgaggattggggatatttaaatgaagatggagaactcggcttggcctaccaaggcctaaagcaagttgccaggctgctggaggctcagctgcaggcccagagcctggagcatgaggaggaggtggagcatctcaaggctcagctcgaggccctgaaggaggagatggacaaacagcagcagaccttctgccagacgctactgctctccccagaggcccaggtggaattcggcgttcagcaggaaatatcccggctgaccaacgagaatctggaccttaaagaactggtagaaaagctggaaaagaatgagaggaagctcaaaaagcaactgaagatttacatgaagaaagcccaggacctagaagctgcccaggcattggcccagagtgagaggaagcgccatgagctcaacaggcaggtcacggtccagcggaaagagaaggatttccagggcatgctggagtaccacaaagaggacgaggccctcctcatccggaacctggtgacagacttgaagccccagatgctgtcgggcacagtgccctgtctccccgcctacatcctctacatgtgcatccggcacgcggactacaccaacgacgatctcaaggtgcactccctgctgacctccaccatcaacggcattaagaaagtcctgaaaaagcacaatgatgactttgagatgacgtcattctggttatccaacacctgccgccttcttcactgtctgaagcagtacagcggggatgagggcttcatgactcagaacactgcaaagcagaatgaacactgtcttaagaattttgacctcaccgaataccgtcaggtgctgagtgacctttccattcagatctaccagcagctcattaaaattgccgagggcgtgttacagccgatgatagtttctgccatgttggaaaatgagagcattcagggtctatctggtgtgaagcccaccggctaccggaagcgctcctccagcatggcagatggggataactcatactgcctggaagctatcatccgccagatgaatgcctttcatacagtcatgtgtgaccagggcttggaccctgagatcatcctgcaggtattcaaacagctcttctacatgatcaacgcagtgactcttaacaacctgctcttgcggaaggacgtctgctcttggagcacaggcatgcaactcaggtacaatataagtcagcttgaggagtggcttcggggaagaaaccttcaccagagtggagcagttcagaccatggaacctctgatccaagcagcccagctcctgcaattaaagaagaaaacccaggaggacgcagaggctatctgctccctgtgtacctccctcagcacccagcagattgtcaaaattttaaacctttatactcccctgaatgaatttgaagaacgggtaacagtggcctttatacgaacaatccaggcacaactacaagagcggaatgaccctcagcaactgctattagatgccaagcacatgtttcctgttttgtttccatttaatccatcttctctaaccatggactcaatccacatcccagcgtgtctcaatctggaattcctcaatgaagtctgaagatgcatgtttccagcattagtttgattcccaatgtgagcaagaaggaagtatatacagtaaagtaaattcaaggatctgttaaatctggtaaaagtagatcaaatcagagattgacagcctgtggagggtgctgaactatacagaattagacacaactatgtcattattttttgtacctactgctcagaataaaaacacttgaaatatggaagattttaagtttgatttcagtccaacacatatacataatttatagacaccaagcagtccccatagacatataaaaggtgtcaattctataaaacgaagctgcctagttttgatctttgcatagaactagagaatgtccaaattaaaataccaaatatatataagtcacataaattgccttcaaagggctttaacaaataatggtactaataaccatgataatggcatatactgacatttcccaaagtttgcaaaccataggtgtggttgagtttgtggtgagatgttttaagaacaaaaatatggggatgagacttctgagaaatattcccaaaatattttttaatggctgattatacacagacagtggtgtaactgacctccagaccagacattttgagtactggtttctgaagcaaaattagaagtgccagtcctcagtgtgctcaaacgcttttgtgttatcttgatttaatggaagagattattaaaatgctgctatcccaaactccaagtgagaaagatggaaaaatattttgtttctgatgctagtccatacactttccaagtcccacaaaactttcacaaaaatgtatataagctaaatattagaaacggataacaaacttgttttatttatagatgtaaaaaccaaacaagtcaatatgaaagcttttaatctcttaataccattaagcttccagtaagagcatcacataatgctctactgttccagaaaccaaatagtaaaacaaactaaagttcgcacatcagatcatctgaaaaaccttcaaaaataatcagttcagggatattatacaaaagtttgggttttttttttttaagagaataaaatggcttaggtcaactttcccttttcaggttattttcaacgtttttcaaatttagcacacaaaaaattgtaaatatctctcccacaaaataaggattttaaaaaagtaattcagtaatataacaggcttagatgtttgctgctcttagaattttttttaacttgtttttggtttcttcaaaagcaagcattcaattggaaacccatattctttccacacttttttttactgtcttttctgtatttcttgatagcagtatgctgttcccataagaaaaaaatggtatttgcaaatcatggaagaacagcctctgtattacattgagaaaataagatttatccatgaattggaagtagaacagcctgccttcaccctcttttactcaaccacccaacttaaaaggctcttggaaacacagcacactccacgctaccttctgcactgtgcccttagagcacagcttcctcagttgttctctgcatctcctggggcttaggccagtcttagcctgggttaaggctgctgacattgtgttccaatcagttgtcatgggcattatcccctctacatccacattaaacatgccggcttctcttgggcatcggcagagctgtgcctttttctttcagttacagttacataatcactgacgtccatgacacttacccatggatccatgtgctgacttcatttagaaggccaatctaaaacaactgggtttgtggctacctctttaaagttgtttgtgaaggataatttgttttttaatgcactttagtttgaaagtgagtctcttatgtaaggaccatccttaaaagaccaaaaatgccttgttagagtgttaaggagttttgacatgcagtggttccacaaacacagtggcttactatccttatacactgtcttataccatcattctctccatctctcttggtcactactctctgctgtcactggttaatcactaggtgccaagagcttactgaataaaagcttggcaattagaataaatggggagggaaggaccttatgaatagtccatttagcctaagaaatggcagatttagttcttctcttccaaaagataaaggtatatcctggaattgtacttaaaacttacagatgactaacaaatatatactttatatgtagttaatatttagatctgtcttatttaatacttggaggctagaagaagcatctttaggggaactatataatcttttgttagcattttctctgcattttaaaaaatcatttcaattcaaacatttatcagtgtcatgaaatcagtaatgactctttaacaattcaggtttgaactctgcattagatgtctctttaattttttaatatttaaaatttagttgacatttttttcaccaggtgcctttagcggttactaagataactgacatcagttgtttctctgaaataagtgttgctgtgggaataattttaatgttcaag

SEQ ID NO: 8479 - protein, 1884 aa, Homo sapiens
MTIEDTSVETHFSEMVALKIVGGASTNWGNSLMLVVPGHPGTYLPCTRVWIPDPDEVWRSAELTKDYKEGDKSLQLRLEDETILEYPIDVQRNQLPFLRNPDILVGENDLTALSYLHEPAVLHNLKVRFLESNHIYTYCGIVLVAINPYEQLPIYGQDVIYTYSGQNMGDMDPHIFAVAEEAYKQMARDEKNQSIIVSGESGAGKTVSAKYAMRYFATVGGSASETNIEEKVLASSPIMEAIGNAKTTRNDNSSRFGKYIQIGFDKRYHIIGANMRTYLLEKSRVVFQADDERNYHIFYQLCAAAGLPEFKELALTSAEDFFYTSQGGDTSIEGVDDAEDFEKTRQAFTLLGVKESHQMSIFKIIASILHLGSVAIQAERDGDSCSISPQDVYLSNFCRLLGVEHSQMEHWLCHRKLVTTSETYVKTMSLQQVINARNALAKHIYAQLFGWIVEHINKALHTSLKQHSFIGVLDIYGFETFEVNSFEQFCINYANEKLQQQFNSHVFKLEQEEYMKEQIPWTLIDFYDNQPCIDLIEAKLGILDLLDEECKVPKGTDQNWAQKLYDRHSSSQHFQKPRMSNTAFIIVHFADKVEYLSDGFLEKNRDTVYEEQINILKASKFPLVADLFHDDKDPVPATTPGKGSSSKISVRSARPPMKVSNKEHKKTVGHQFRTSLHLLMETLNATTPHYVRCIKPNDEKLPFHFDPKRAVQQLRACGVLETIRISAAGYPSRWAYHDFFNRYRVLVKKRELANTDKKAICRSVLENLIKDPDKFQFGRTKIFFRAGQVAYLEKLRADKFRTATIMIQKTVRGWLQKVKYHRLKGATLTLQRYCRGHLARRLAEHLRRIRAAVVLQKHYRMQRARQAYQRVRRAAVVIQAFTRAMFVRRTYRQVLMEHKATTIQKHVRGWMARRHFQRLRDAAIVIQCAFRMLKARRELKALRIEARSAEHLKRLNVGMENKVVQLQRKIDEQNKEFKTLSEQLSVTTSTYTMEVERLKKELVHYQQSPGEDTSLRLQEEVESLRTELQRAHSERKILEDAHSREKDELRKRVADLEQENALLKDEKEQLNNQILCQSKDEFAQNSVKENLMKKELEEERSRYQNLVKEYSQLEQRYDNLRDEMTIIKQTPGHRRNPSNQSSLESDSNYPSISTSEIGDTEDALQQVEEIGLEKAAMDMTVFLKLQKRVRELEQERKKLQVQLEKREQQDSKKVQAEPPQTDIDLDPNADLAYNSLKRQELESENKKLKNDLNELRKAVADQATQNNSSHGSPDSYSLLLNQLKLAHEELEVRKEEVLILRTQIVSADQRRLAGRNAEPNINARSSWPNSEKHVDQEDAIEAYHGVCQTNSKTEDWGYLNEDGELGLAYQGLKQVARLLEAQLQAQSLEHEEEVEHLKAQLEALKEEMDKQQQTFCQTLLLSPEAQVEFGVQQEISRLTNENLDLKELVEKLEKNERKLKKQLKIYMKKAQDLEAAQALAQSERKRHELNRQVTVQRKEKDFQGMLEYHKEDEALLIRNLVTDLKPQMLSGTVPCLPAYILYMCIRHADYTNDDLKVHSLLTSTINGIKKVLKKHNDDFEMTSFWLSNTCRLLHCLKQYSGDEGFMTQNTAKQNEHCLKNFDLTEYRQVLSDLSIQIYQQLIKIAEGVLQPMIVSAMLENESIQGLSGVKPTGYRKRSSSMADGDNSYCLEAIIRQMNAFHTVMCDQGLDPEIILQVFKQLFYMINAVTLNNLLLRKDVCSWSTGMQLRYNISQLEEWLRGRNLHQSGAVQTMEPLIQAAQLLQLKKKTQEDAEAICSLCTSLSTQQIVKILNLYTPLNEFEERVTVAFIRTIQAQLQERNDPQQLLLDAKHMFPVLFPFNPSSLTMDSIHIPACLNLEFLNEV

SEQ ID NO: 8480 - DNA, 8192 bp, Homo sapiens
cgcctcctccccacacctgggaggggagtggtgcggcgcggcctcctcccccggcgctcgcaactcctgtccggccgtagctgcgccgccgcggcgggagtaaaggtcgcgccgccgggagcgagccggccgcggcgcctgcgggaagccggcggggcaggtcggagaagagcgagaagatcgagaaactccaggccagcccgggaacatggcgccaggcgggccagccgcggactgagagccgcggggcagccaggagccggggcccgagccccgcccggcccgggccatgtcggtgggcgagctctacagccagtgcacaagggtctggatccctgaccctgatgaggtatggcgctcagctgagttaaccaaggactacaaagaaggagacaagagcctacagctcagactggaggatgaaacgattctggaatacccaattgatgtacaacgcaaccagctgcccttcttacggaatccagatatcttggtgggagaaaatgacctgactgcccttagctatcttcatgagcctgcagttttgcataatttgaaggtccgtttcctggagtccaaccatatctacacttactgtggtatcgtacttgttgccattaatccttatgaacagttgccaatctatggacaagatgtcatctatacctacagtggccaaaacatgggagacatggacccccacatctttgctgtggcagaagaagcctacaagcagatggccagagatgagaagaatcagtccatcatagtcagtggggagtctggagccgggaagacggtatcagccaagtatgccatgcgctatttcgccaccgttggtggctcggccagtgaaaccaacatcgaagagaaggtgctggcatccagtcccatcatggaggccattggaaatgccaagaccacccgcaatgacaacagcagccgttttggcaagtacatccagattggctttgacaaaaggtaccacatcatcggggccaacatgaggacttacctcttggagaagtccagagtggtcttccaggcagatgatgagaggaattaccacatcttttaccagctctgtgctgctgccggtcttccagaatttaaagagcttgcactaacaagtgcagaggactttttctatacatcacagggaggagacacttccatcgagggtgtggacgatgctgaggactttgagaagactcgacaagccttcacactcctcggagtgaaagagtcccatcagatgagcatttttaagataattgcttctatcttgcaccttggaagtgtggcgattcaggctgagcgtgatggtgattcctgtagtatatcaccccaggatgtatacctaagcaacttctgccgactgctaggggtggagcacagtcagatggagcactggctgtgtcatcgcaagctggtcaccacctcggagacctacgtcaagaccatgtccctgcagcaggtgatcaatgcgcgcaacgccctggcgaagcacatctatgcccagttgttcggctggattgtggagcacatcaacaaggccctgcacacctccctcaagcagcactccttcatcggggtcctggacatctatgggtttgagacatttgaggtaaacagctttgagcagttctgtatcaactatgcaaatgaaaagctccagcagcagttcaactcgcatgttttcaaactggagcaagaagaatacatgaaggaacagatcccttggaccctgattgatttttatgataaccaaccttgtatcgacctcattgaagccaagctgggtatcttggacctgttggatgaagaatgtaaggtccccaaaggaactgaccagaactgggctcagaagctctatgaccggcactccagcagccagcacttccagaagccccgcatgtccaacacggccttcatcatcgtccactttgcagacaaggtggagtacctctctgatggttttctggagaaaaacagagacacggtgtatgaagagcagatcaatatcctgaaggccagcaagttcccactagtggctgacttgtttcatgatgacaaggaccctgttcctgccaccacccctgggaaggggtcatcttcgaagatcagcgtccgttctgccagaccccccatgaaagtctccaacaaggagcacaagaaaaccgttggccaccagttccgtacctccctgcatctgctcatggagaccctgaatgccacgacacctcactatgtccgctgcatcaagcccaacgatgagaagctcccctttcactttgacccaaagagagcagtgcagcaactcagagcctgcggggtgttggagacgattcgaatcagtgcagctggctacccatccaggtgggcctaccatgactttttcaaccggtatcgggtgctggtcaagaagagagagctcgccaacacagacaaaaaggccatctgcaggtctgtcctggagaacctcatcaaggaccccgacaagttccagtttggccgcaccaagatcttctttcgagcaggccaggtggcctacctggagaagctgcgggctgacaagttccggacagccaccatcatgatccagaaaactgtccggggatggctgcagaaggtgaaatatcacaggctgaagggggctaccttaaccctgcagaggtactgccggggacacctggcccgcaggctggctgagcacctgcggaggatcagagcggctgtggtgctccagaaacattaccgcatgcagagggcccgccaggcctaccagagggtccgcagagctgccgttgttatccaggccttcacccgggccatgtttgtgcggagaacctaccgccaggtcctcatggagcacaaggccaccaccatccagaagcacgtgcggggctggatggcacgcaggcacttccagcggctgcgggatgcagccattgtcatccagtgtgccttccggatgctcaaggccaggcgggagctgaaggccctcaggattgaggcccgctcagcagagcatctgaaacgtctcaacgtgggcatggagaacaaggtggtccagctgcagcggaagatcgatgagcagaacaaagagttcaagacactttcagagcagttgtccgtgaccacctcaacatacaccatggaggtagagcggctgaagaaggagctggtgcactaccagcagagcccaggtgaggacaccagcctcaggctgcaggaggaggtggagagcctgcgcacagagctgcagagggcccactcggagcgcaagatcttggaggacgcccacagcagggagaaagatgagctgaggaagcgagttgcagacctggagcaagaaaatgctctcttgaaagatgagaaagaacagctcaacaaccaaatcctgtgccagtctaaagatgaatttgcccagaactctgtgaaggaaaatctcatgaagaaagaactggaggaggagcgatcccggtaccagaaccttgtgaaggaatattcacagttggagcagagatacgacaaccttcgggatgaaatgaccatcataaagcaaactccaggtcataggcggaacccatcaaaccaaagtagcttagaatctgactccaattacccctccatctccacatctgagatcggagacactgaggatgccctccagcaggtggaggaaattggcctggagaaggcagccatggacatgacggtcttcctgaagctgcagaagagagtacgggagctggagcaggagaggaaaaagctgcaagtgcagctggagaagagagaacagcaggacagcaagaaagtccaggcggaaccaccacagactgacatagatttggacccgaatgcagatctggcctacaatagtctgaagaggcaagagctggagtcagagaacaaaaagctgaagaatgacctgaatgagctgaggaaagccgtggccgaccaagccacgcagaataactccagccacggctccccagatagctacagcctcctgctgaaccagctcaagctggcccacgaggagctcgaggtgcgcaaggaggaggtgctcatcctcaggacccagatcgtgagcgccgaccagcggcgactcgccggcaggaacgcggagccgaacattaatgccagatcaagttggcctaacagtgaaaagcatgttgaccaggaggatgccattgaggcctatcacggggtctgccagacaaacagcaagactgaggattggggatatttaaatgaagatggagaactcggcttggcctaccaaggcctaaagcaagttgccaggctgctggaggctcagctgcaggcccagagcctggagcatgaggaggaggtggagcatctcaaggctcagctcgaggccctgaaggaggagatggacaaacagcagcagaccttctgccagacgctactgctctccccagaggcccaggtggaattcggcgttcagcaggaaatatcccggctgaccaacgagaatctggaccttaaagaactggtagaaaagctggaaaagaatgagaggaagctcaaaaagcaactgaagatttacatgaagaaagcccaggacctagaagctgcccaggcattggcccagagtgagaggaagcgccatgagctcaacaggcaggtcacggtccagcggaaagagaaggatttccagggcatgctggagtaccacaaagaggacgaggccctcctcatccggaacctggtgacagacttgaagccccagatgctgtcgggcacagtgccctgtctccccgcctacatcctctacatgtgcatccggcacgcggactacaccaacgacgatctcaaggtgcactccctgctgacctccaccatcaacggcattaagaaagtcctgaaaaagcacaatgatgactttgagatgacgtcattctggttatccaacacctgccgccttcttcactgtctgaagcagtacagcggggatgagggcttcatgactcagaacactgcaaagcagaatgaacactgtcttaagaattttgacctcaccgaataccgtcaggtgctgagtgacctttccattcagatctaccagcagctcattaaaattgccgagggcgtgttacagccgatgatagtttctgccatgttggaaaatgagagcattcagggtctatctggtgtgaagcccaccggctaccggaagcgctcctccagcatggcagatggggataactcatactgcctggaagctatcatccgccagatgaatgcctttcatacagtcatgtgtgaccagggcttggaccctgagatcatcctgcaggtattcaaacagctcttctacatgatcaacgcagtgactcttaacaacctgctcttgcggaaggacgtctgctcttggagcacaggcatgcaactcaggtacaatataagtcagcttgaggagtggcttcggggaagaaaccttcaccagagtggagcagttcagaccatggaacctctgatccaagcagcccagctcctgcaattaaagaagaaaacccaggaggacgcagaggctatctgctccctgtgtacctccctcagcacccagcagattgtcaaaattttaaacctttatactcccctgaatgaatttgaagaacgggtaacagtggcctttatacgaacaatccaggcacaactacaagagcggaatgaccctcagcaactgctattagatgccaagcacatgtttcctgttttgtttccatttaatccatcttctctaaccatggactcaatccacatcccagcgtgtctcaatctggaattcctcaatgaagtctgaagatgcatgtttccagcattagtttgattcccaatgtgagcaagaaggaagtatatacagtaaagtaaattcaaggatctgttaaatctggtaaaagtagatcaaatcagagattgacagcctgtggagggtgctgaactatacagaattagacacaactatgtcattattttttgtacctactgctcagaataaaaacacttgaaatatggaagattttaagtttgatttcagtccaacacatatacataatttatagacaccaagcagtccccatagacatataaaaggtgtcaattctataaaacgaagctgcctagttttgatctttgcatagaactagagaatgtccaaattaaaataccaaatatatataagtcacataaattgccttcaaagggctttaacaaataatggtactaataaccatgataatggcatatactgacatttcccaaagtttgcaaaccataggtgtggttgagtttgtggtgagatgttttaagaacaaaaatatggggatgagacttctgagaaatattcccaaaatattttttaatggctgattatacacagacagtggtgtaactgacctccagaccagacattttgagtactggtttctgaagcaaaattagaagtgccagtcctcagtgtgctcaaacgcttttgtgttatcttgatttaatggaagagattattaaaatgctgctatcccaaactccaagtgagaaagatggaaaaatattttgtttctgatgctagtccatacactttccaagtcccacaaaactttcacaaaaatgtatataagctaaatattagaaacggataacaaacttgttttatttatagatgtaaaaaccaaacaagtcaatatgaaagcttttaatctcttaataccattaagcttccagtaagagcatcacataatgctctactgttccagaaaccaaatagtaaaacaaactaaagttcgcacatcagatcatctgaaaaaccttcaaaaataatcagttcagggatattatacaaaagtttgggttttttttttttaagagaataaaatggcttaggtcaactttcccttttcaggttattttcaacgtttttcaaatttagcacacaaaaaattgtaaatatctctcccacaaaataaggattttaaaaaagtaattcagtaatataacaggcttagatgtttgctgctcttagaattttttttaacttgtttttggtttcttcaaaagcaagcattcaattggaaacccatattctttccacacttttttttactgtcttttctgtatttcttgatagcagtatgctgttcccataagaaaaaaatggtatttgcaaatcatggaagaacagcctctgtattacattgagaaaataagatttatccatgaattggaagtagaacagcctgccttcaccctcttttactcaaccacccaacttaaaaggctcttggaaacacagcacactccacgctaccttctgcactgtgcccttagagcacagcttcctcagttgttctctgcatctcctggggcttaggccagtcttagcctgggttaaggctgctgacattgtgttccaatcagttgtcatgggcattatcccctctacatccacattaaacatgccggcttctcttgggcatcggcagagctgtgcctttttctttcagttacagttacataatcactgacgtccatgacacttacccatggatccatgtgctgacttcatttagaaggccaatctaaaacaactgggtttgtggctacctctttaaagttgtttgtgaaggataatttgttttttaatgcactttagtttgaaagtgagtctcttatgtaaggaccatccttaaaagaccaaaaatgccttgttagagtgttaaggagttttgacatgcagtggttccacaaacacagtggcttactatccttatacactgtcttataccatcattctctccatctctcttggtcactactctctgctgtcactggttaatcactaggtgccaagagcttactgaataaaagcttggcaattagaataaatggggagggaaggaccttatgaatagtccatttagcctaagaaatggcagatttagttcttctcttccaaaagataaaggtatatcctggaattgtacttaaaacttacagatgactaacaaatatatactttatatgtagttaatatttagatctgtcttatttaatacttggaggctagaagaagcatctttaggggaactatataatcttttgttagcattttctctgcattttaaaaaatcatttcaattcaaacatttatcagtgtcatgaaa

SEQ ID NO: 8481 - protein, 1848 aa, Homo sapiens; identical to SEQ ID NO: 1182

SEQ ID NO: 8482 - DNA, 4091 bp, Homo sapiens
agccctacattctgctgctgctgcagagtgatgatttttaacagaccagaacttacacatctaaatgagtgttgttgttcagtgaagtcaccttaggacaatgatttaaataacaccgcgatttctcaagaagtttggaacttctcttatggttgagttcaaagccattttatgttatatgtggcccaaacaagttttattagtacaattaaatctttattgaggacttttgatggaccacatagtgaacttggactgggaatcaaaagaatggtaaggcagggtgtctgccttcactgtgcctgcagtctggctgagatgcacatgtgagccacactagcacaagccagcatgcactggcctgtcacaagagagtgcacaagggtctggatccctgaccctgatgaggtatggcgctcagctgagttaaccaaggactacaaagaaggagacaagagcctacagctcagactggaggatgaaacgattctggaatacccaattgatgtacaacgcaaccagctgcccttcttacggaatccagatatcttggtgggagaaaatgacctgactgcccttagctatcttcatgagcctgcagttttgcataatttgaaggtccgtttcctggagtccaaccatatctacacttactgtggtatcgtacttgttgccattaatccttatgaacagttgccaatctatggacaagatgtcatctatacctacagtggccaaaacatgggagacatggacccccacatctttgctgtggcagaagaagcctacaagcagatggccagagatgagaagaatcagtccatcatagtcagtggggagtctggagccgggaagacggtatcagccaagtatgccatgcgctatttcgccaccgttggtggctcggccagtgaaaccaacatcgaagagaaggtgctggcatccagtcccatcatggaggccattggaaatgccaagaccacccgcaatgacaacagcagccgttttggcaagtacatccagattggctttgacaaaaggtaccacatcatcggggccaacatgaggacttacctcttggagaagtccagagtggtcttccaggcagatgatgagaggaattaccacatcttttaccagctctgtgctgctgccggtcttccagaatttaaagagcttgcactaacaagtgcagaggactttttctatacatcacagggaggagacacttccatcgagggtgtggacgatgctgaggactttgagaagactcgacaagccttcacactcctcggagtgaaagagtcccatcagatgagcatttttaagataattgcttctatcttgcaccttggaagtgtggcgattcaggctgagcgtgatggtgattcctgtagtatatcaccccaggatgtatacctaagcaacttctgccgactgctaggggtggagcacagtcagatggagcactggctgtgtcatcgcaagctggtcaccacctcggagacctacgtcaagaccatgtccctgcagcaggtgatcaatgcgcgcaacgccctggcgaagcacatctatgcccagttgttcggctggattgtggagcacatcaacaaggccctgcacacctccctcaagcagcactccttcatcggggtcctggacatctatgggtttgagacatttgaggtaaacagctttgagcagttctgtatcaactatgcaaatgaaaagctccagcagcagttcaactcgcatgttttcaaactggagcaagaagaatacatgaaggaacagatcccttggaccctgattgatttttatgataaccaaccttgtatcgacctcattgaagccaagctgggtatcttggacctgttggatgaagaatgtaaggtccccaaaggaactgaccagaactgggctcagaagctctatgaccggcactccagcagccagcacttccagaagccccgcatgtccaacacggccttcatcatcgtccactttgcagacaaggtggagtacctctctgatggttttctggagaaaaacagagacacggtgtatgaagagcagatcaatatcctgaaggccagcaagttcccactagtggctgacttgtttcatgatgacaaggaccctgttcctgccaccacccctgggaaggggtcatcttcgaagatcagcgtccgttctgccagaccccccatgaaagtctccaacaaggagcacaagaaaaccgttggccaccagtgtacctccctcagcacccagcagattgtcaaaattttaaacctttatactcccctgaatgaatttgaagaacgggtaacagtggcctttatacgaacaatccaggcacaactacaagagcggaatgaccctcagcaactgctattagatgccaagcacatgtttcctgttttgtttccatttaatccatcttctctaaccatggactcaatccacatcccagcgtgtctcaatctggaattcctcaatgaagtctgaagatgcatgtttccagcattagtttgattcccaatgtgagcaagaaggaagtatatacagtaaagtaaattcaaggatctgttaaatctggtaaaagtagatcaaatcagagattgacagcctgtggagggtgctgaactatacagaattagacacaactatgtcattattttttgtacctactgctcagaataaaaacacttgaaatatggaagattttaagtttgatttcagtccaacacatatacataatttatagacaccaagcagtccccatagacatataaaaggtgtcaattctataaaacgaagctgcctagttttgatctttgcatagaactagagaatgtccaaattaaaataccaaatatatataagtcacataaattgccttcaaagggctttaacaaataatggtactaataaccatgataatggcatatactgacatttcccaaagtttgcaaaccataggtgtggttgagtttgtggtgagatgttttaagaacaaaaatatggggatgagacttctgagaaatattcccaaaatattttttaatggctgattatacacagacagtggtgtaactgacctccagaccagacattttgagtactggtttctgaagcaaaattagaagtgccagtcctcagtgtgctcaaacgcttttgtgttatcttgatttaatggaagagattattaaaatgctgctatcccaaactccaagtgagaaagatggaaaaatattttgtttctgatgctagtccatacactttccaagtcccacaaaactttcacaaaaatgtatataagctaaatattagaaacggataacaaacttgttttatttatagatgtaaaaaccaaacaagtcaatatgaaagcttttaatctcttaataccattaagcttccagtaagagcatcacataatgctctactgttccagaaaccaaatagtaaaacaaactaaagttcgcacatcagatcatctgaaaaaccttcaaaaataatcagttcagggatattatacaaaagtttgggttttttttttttaagagaataaaatggcttaggtcaactttcccttttcaggttattttcaacgtttttcaaatttagcacacaaaaaattgtaaatatctctcccacaaaataaggattttaaaaaagtaattcagtaatataacaggcttagatgtttgctgctcttagaattttttttaacttgtttttggtttcttcaaaagcaagcattcaattggaaacccatattctttccacacttttttttactgtcttttctgtatttcttgatagcagtatgctgttcccataagaaaaaaatggtatttgcaaatcatggaagaacagcctctgtattacattgagaaaataagatttatccatgaattggaagtagaacagcctgccttcaccctcttttactcaaccacccaacttaaaaggctcttggaaacacagcacactccacgctaccttctgcactgtgcccttagagcacagcttcctcagttgttctctgcatctcctggggcttaggccagtcttagcctggg

SEQ ID NO: 8483 - protein, 719 aa, Homo sapiens
MHWPVTRECTRVWIPDPDEVWRSAELTKDYKEGDKSLQLRLEDETILEYPIDVQRNQLPFLRNPDILVGENDLTALSYLHEPAVLHNLKVRFLESNHIYTYCGIVLVAINPYEQLPIYGQDVIYTYSGQNMGDMDPHIFAVAEEAYKQMARDEKNQSIIVSGESGAGKTVSAKYAMRYFATVGGSASETNIEEKVLASSPIMEAIGNAKTTRNDNSSRFGKYIQIGFDKRYHIIGANMRTYLLEKSRVVFQADDERNYHIFYQLCAAAGLPEFKELALTSAEDFFYTSQGGDTSIEGVDDAEDFEKTRQAFTLLGVKESHQMSIFKIIASILHLGSVAIQAERDGDSCSISPQDVYLSNFCRLLGVEHSQMEHWLCHRKLVTTSETYVKTMSLQQVINARNALAKHIYAQLFGWIVEHINKALHTSLKQHSFIGVLDIYGFETFEVNSFEQFCINYANEKLQQQFNSHVFKLEQEEYMKEQIPWTLIDFYDNQPCIDLIEAKLGILDLLDEECKVPKGTDQNWAQKLYDRHSSSQHFQKPRMSNTAFIIVHFADKVEYLSDGFLEKNRDTVYEEQINILKASKFPLVADLFHDDKDPVPATTPGKGSSSKISVRSARPPMKVSNKEHKKTVGHQCTSLSTQQIVKILNLYTPLNEFEERVTVAFIRTIQAQLQERNDPQQLLLDAKHMFPVLFPFNPSSLTMDSIHIPACLNLEFLNEV

SEQ ID NO: 8484 - DNA, 1713 bp, Homo sapiens
agagcaggtggcaacagcctgtgaagagcagctctcctggcagcgtccctgactggcgcatttctgacggctgcccatgggccgcactggtcacctccaactgcaagcaggattttacccccaccatcccaggccgggctgatgtctgttctcacactgcttcctctgcttccaggaccttaaagaactggtagaaaagctggaaaagaatgagaggaagctcaaaaagcaactgaagatttacatgaagaaagcccaggacctagaagctgcccaggcattggcccagagtgagaggaagcgccatgagctcaacaggcaggtcacggtccagcggaaagagaaggatttccagggcatgctggagtaccacaaagaggacgaggccctcctcatccggaacctggtgacagacttgaagccccagatgctgtcgggcacagtgccctgtctccccgcctacatcctctacatgtgcatccggcacgcggactacaccaacgacgatctcaaggtgcactccctgctgacctccaccatcaacggcattaagaaagtcctgaaaaagcacaatgatgactttgagatgacgtcattctggttatccaacacctgccgccttcttcactgtctgaagcagtacagcggggatgagggcttcatgactcagaacactgcaaagcagaatgaacactgtcttaagaattttgacctcaccgaataccgtcaggtgctgagtgacctttccattcagatctaccagcagctcattaaaattgccgagggcgtgttacagccgatgatagtttctgccatgttggaaaatgagagcattcagggtctatctggtgtgaagcccaccggctaccggaagcgctcctccagcatggcagatggggataactcatactgcctggaagctatcatccgccagatgaatgcctttcatacagtcatgtgtgaccagggcttggaccctgagatcatcctgcaggtattcaaacagctcttctacatgatcaacgcagtgactcttaacaacctgctcttgcggaaggacgtctgctcttggagcacaggcatgcaactcaggtacaatataagtcagcttgaggagtggcttcggggaagaaaccttcaccagagtggagcagttcagaccatggaacctctgatccaagcagcccagctcctgcaattaaagaagaaaacccaggaggacgcagaggctatctgctccctgtgtacctccctcagcacccagcagattgtcaaaattttaaacctttatactcccctgaatgaatttgaagaacgggtaacagtggcctttatacgaacaatccaggcacaactacaagagcggaatgaccctcagcaactgctattagatgccaagcacatgtttcctgttttgtttccatttaatccatcttctctaaccatggactcaatccacatcccagcgtgtctcaatctggaattcctcaatgaagtctgaagatgcatgtttccagcattagtttgattcccaatgtgagcaagaaggaagtatatacagtaaagtaaattcaaggatctgttaaatctggtaaaagtagatcaaatcagagattgacagcctgtggagggtgctgaactatacagaattagacacaactatgtcattattttttgtacctactgctcagaataaaaacacttgaaatatgg

SEQ ID NO: 8485 - protein, 418 aa, Homo sapiens; identical to SEQ ID NO: 1188

SEQ ID NO: 8486 - DNA, 2723 bp, Homo sapiens
agccctacattctgctgctgctgcagagtgatgatttttaacagaccagaacttacacatctaaatgagtgttgttgttcagtgaagtcaccttaggacaatgatttaaataacaccgcgatttctcaagaagtttggaacttctcttatggttgagttcaaagccattttatgttatatgtggcccaaacaagttttattagtacaattaaatctttattgaggacttttgatggaccacatagtgaacttggactgggaatcaaaagaatggtaaggcagggtgtctgccttcactgtgcctgcagtctggctgagatgcacatgtgagccacactagcacaagccagcatgcactggcctgtcacaagagagtgcacaagggtctggatccctgaccctgatgaggtatggcgctcagctgagttaaccaaggactacaaagaaggagacaagagcctacagctcagactggaggatgaaacgattctggaatacccaattgatgtacaacgcaaccagctgcccttcttacggaatccagatatcttggtgggagaaaatgacctgactgcccttagctatcttcatgagcctgcagttttgcataatttgaaggtccgtttcctggagtccaaccatatctacacttactgtggtatcgtacttgttgccattaatccttatgaacagttgccaatctatggacaagatgtcatctatacctacagtggccaaaacatgggagacatggacccccacatctttgctgtggcagaagaagcctacaagcagatggccagagatgagaagaatcagtccatcatagtcagtggggagtctggagccgggaagacggtatcagccaagtatgccatgcgctatttcgccaccgttggtggctcggccagtgaaaccaacatcgaagagaaggtgctggcatccagtcccatcatggaggccattggaaatgccaagaccacccgcaatgacaacagcagccgttttggcaagtacatccagattggctttgacaaaaggtaccacatcatcggggccaacatgaggacttacctcttggagaagtccagagtggtcttccaggcagatgatgagaggaattaccacatcttttaccagctctgtgctgctgccggtcttccagaatttaaagagcttgcactaacaagtgcagaggactttttctatacatcacagggaggagacacttccatcgagggtgtggacgatgctgaggactttgagaagactcgacaagccttcacactcctcggagtgaaagagtcccatcagatgagcatttttaagataattgcttctatcttgcaccttggaagtgtggcgattcaggctgagcgtgatggtgattcctgtagtatatcaccccaggatgtatacctaagcaacttctgccgactgctaggggtggagcacagtcagatggagcactggctgtgtcatcgcaagctggtcaccacctcggagacctacgtcaagaccatgtccctgcagcaggtgatcaatgcgcgcaacgccctggcgaagcacatctatgcccagttgttcggctggattgtggagcacatcaacaaggccctgcacacctccctcaagcagcactccttcatcggggtcctggacatctatgggtttgagacatttgaggtaaacagctttgagcagttctgtatcaactatgcaaatgaaaagctccagcagcagttcaactcgcatgttttcaaactggagcaagaagaatacatgaaggaacagatcccttggaccctgattgatttttatgataaccaaccttgtatcgacctcattgaagccaagctgggtatcttggacctgttggatgaagaatgtaaggtccccaaaggaactgaccagaactgggctcagaagctctatgaccggcactccagcagccagcacttccagaagccccgcatgtccaacacggccttcatcatcgtccactttgcagacaaggtggagtacctctctgatggttttctggagaaaaacagagacacggtgtatgaagagcagatcaatatcctgaaggccagcaagttcccactagtggctgacttgtttcatgatgacaaggaccctgttcctgccaccacccctgggaaggggtcatcttcgaagatcagcgtccgttctgccagaccccccatgaaagtctccaacaaggagcacaagaaaaccgttggccaccagtgtacctccctcagcacccagcagattgtcaaaattttaaacctttatactcccctgaatgaatttgaagaacgggtaacagtggcctttatacgaacaatccaggcacaactacaagagcggaatgaccctcagcaactgctattagatgccaagcacatgtttcctgttttgtttccatttaatccatcttctctaaccatggactcaatccacatcccagcgtgtctcaatctggaattcctcaatgaagtctgaagatgcatgtttccagcattagtttgattcccaatgtgagcaagaaggaagtatatacagtaaagtaaattcaaggatctgttaaatctggtaaaagtagatcaaatcagagattgacagcctgtggagggtgctgaactatacagaattagacacaactatgtcattattttttgtacctactgctcagaataaaaacacttgaaatatgg

SEQ ID NO: 8487 - protein, 719 aa, Homo sapiens; identical to SEQ ID NO: 8483

SEQ ID NO: 8488 - DNA, 742 bp, Homo sapiens
gcaggtggcaacagcctgtgaagagcagctctcctggcagcgtccctgactggcgcatttctgacggctgcccatgggccgcactggtcacctccaactgcaagcaggattttacccccaccatcccaggccgggctgatgtctgttctcacactgcttcctctgcttccaggaccttaaagaactggtagaaaagctggaaaagaatgagaggaagctcaaaaagcaactgaagatttacatgaagaaagcccaggacctagaagctgcccaggcattggcccagagtgagaggaagcgccatgagctcaacaggcaggtcacggtccagcggaaagagaaggatttccagggcatgctggagtaccacaaagaggacgaggccctcctcatccggaacctggtgacagacttgaagccccagatgctgtcgggcacagtgccctgtctccccgcctacatcctctacatgtgcatccggcacgcggactacaccaacgacgatctcaaggtgcactccctgctgacctccaccatcaacggcattaagaaagtcctgaaaaagcacaatgatgactttgagatgacgtcattctggttatccaacacctgccgccttcttcactgtctgaagcagtacagcggggatgagggcttcatgactcagaacactgcaaagcagaatgaacactgtcttaagaattttgacctcaccgaataccgtcaggtgctgagtgacctt

SEQ ID NO: 8489 - protein, 166 aa, Homo sapiens
MKKAQDLEAAQALAQSERKRHELNRQVTVQRKEKDFQGMLEYHKEDEALLIRNLVTDLKPQMLSGTVPCLPAYILYMCIRHADYTNDDLKVHSLLTSTINGIKKVLKKHNDDFEMTSFWLSNTCRLLHCLKQYSGDEGFMTQNTAKQNEHCLKNFDLTEYRQVLSD

SEQ ID NO: 8490 - DNA, 812 bp, Homo sapiens
tctacacacagattctcagtgtcctaaagcaaccttcagagatttacctcccacatcactataggtgccttccaagctcagatccaagatacacagccaagatatttcagcaacaacctggctagaaaccggaagaacactataaagtcacatgcacattggtccaatgacagaaggaaggagcttattttcttttctacatgagcacatctgtttggatattcactagagtaaatacttaaatgactaattcacagtttcactttgtcatggttaaagtattttatgagacatctgcttctgctaaatcaggatcttgtttcctcctgagctgtcacactgaaggcaggaacatatgatgctggttgtgttgcaccagcaaaagcttgagagaataaccttttcagacacaagactcccagcttcctttggtatctgtgaagcatctattactgcaagtcaacagacccactgaccacaggaagacctcaactagtgcacagaattatgcttcaactatattcaagtgagaaacggcctgcatgaatgggagaaaatttttgcaatctacccatctgacaaaggtctaatatccagaatctacaagaaacttaaatttacaagaaaaaaaaacagacaactccatcgaaaactgggaaaatgatatggtacttctcaaaagaagacatatttatgcagccaacaaacataaaaaaggctcaacatcacggattagcgaaatgcaaatcaaaaccacaatgagataccatctcatgcagatcagaatggtgattattaaaaagtaaagaaac

SEQ ID NO: 8491 - protein, 46 aa, Homo sapiens
MVLLKRRHIYAANKHKKGSTSRISEMQIKTTMRYHLMQIRMVIIKK

SEQ ID NO: 8492 - DNA, 1824 bp, Homo sapiens
agacttctgcgtcgcggaagcgggtcccgcaggtcgccacggttgggggaaacgcggcggacgccgcccccgtcccgaaggggactcgaaaatgtacagccagcggtttggcaccgtacagcgggaggttaagggccccacccccaaagtggtgatcgtgagatccaagcctcctaaaggccaaggagctgagcaccatctagaaagaatccgacgcagccatcagaagcataatgctattttggcttccattaagtcaagtgagcgggatcgcttgaaagctgagtgggaccagcacaatgactgcaagattttggacagccttgtgcgagcaagaatcaaggatgctgtgcaagggtttatcattaacattgaagaaagacgaaataagctacgtgagcttttagcattagaagaaaatgagtattttacagaaatgcaattgaagaaagaaaccattgaggagaaaaaagataggatgagagagaaaactaaattactaaaagagaagaatgaaaaagagaggcaggattttgtggctgaaaagctagaccagcaattcagggaacgctgtgaggagctccgtgttgaattgttatctatccatcagaagaaggtgtgtgaggagcggaaagcacagattgcatttaatgaggagctgagcaggcaaaagctggtggaagagcagatgttctccaaactctgggaggaagaccgattagccaaggaaaagcgagaagcccaagaggcgaggagacagaaagagctgatggagaacacacgcctggggctgaatgcccagatcaccagcatcaaggcacaaaggcaggcgacacagctgctgaaggaagaggaggcacgccttgtggaaagtaacaacgcacagattaaacatgagaatgaacaggatatgctaaagaaacagaaggcaaagcaggaaactaggaccattttgcaaaaagccctacaagagaggatagaacatattcagcaggaatacagagacgaacaggacttgaacatgaagctcgtgcaaagggcccttcaagacttacaggaagaggcagataaaaagaaacaaaaaagagaagatatgataagagaacagaagatataccataaatatttggcacagagacgtgaggaagaaaaagctcaggagaaagaatttgacagaatattagaggaagacaaggcaaagaagttggctgagaaggacaaggagctgagacttgaaaaggaggcaaggagacagcttgtggatgaggtcatgtgtacaagaaaacttcaagttcaagaaaagttgcaacgagaagctaaagaacaggaagaacgtgctatggaacagaaacacataaatgaaagtcttaaagaacttaactgtgaagagaaggagaattttgcaagacgccaacgtttagcccaggagtacaggaagcaacttcagatgcaaatcgcctaccagcagcagtcccaagaagcagagaaggaagagaaacgccgagagtttgaagcaggtgtagcagcaaacaagatgtgtttggacaaggtccaggaggtcctgtccacccatcaagtgctgcctcaaaacattcatcccatgcgcaaggcatgccccagtaagcttccaccgtagttccgtgagcatcaatatatcttttcttggtcttttaatatttttaactacagtatgcttgtatgcttcttttaactcctggataaacttttcttttttccctgagtttgtgtaattaattgaacataattttcttcctttgaataaacctgtgcctattttggagttcacagacttacaaatccaaa

SEQ ID NO: 8493 - protein, 514 aa, Homo sapiens; identical to SEQ ID NO: 1190

SEQ ID NO: 8494 - DNA, 1200 bp, Homo sapiens
gaagcaagagaaggcggatacccaggacgagtggacaccaggcacagctgtcctgacttctcccgtattggtgcctggctgccctagcaaggcagtagacccaggcctgccttctgtgaagcaagagccacctgacccagaggaggacaaggaggagaacaaggatgattctgcctccaaattggccccagaggaagaggcaggaggggctggcacacccgtgatcacggagattttcagcctgggtggaacccgcttccgagatacagcagtctggttgccaaggtattaccaccttgctcttgactggaaatgcaactgtggttaccacctgtgctgcaggtccgtcctggttccctgatttgtgtttcctgttctgcctggatcctgattctcagaaaccagttactggacttctgatccacatcctgaccctggtccactgtgaccctcagactcttaattatgctccaccaggtcgtgccactgccccactagtccatttgatctgcccccatcctaggatatcctgagtctaagccctggtttctgccaatggcaaataggaagattttattaacaggttttaaaaaattattattattactggttatttggtttgacaaggcacttaggctccctgagctttgccttagctggaaaataaggatagtattacttgctattctatcaaccctgtaagatatttgcggccacgcgcggtagcgcaccctgtaattccaacactttgggaggccggcgggaggggcagtggggaggatcgcttgaacccaggagcaggagttccagcctgagcaacatagcgggaccccctgtctcttcaaaatttgtttttaaattagcagggcgtggtggcgcaggctttgtagtcccagatactctggaggctgaggcccaggaggacgaggctgcagggagccatgatcacgccactgcactccaccctgggcgacagagcgagaccttgtctcagaaaaaatctgtgaggttaaaaggctgtgtgtgtgaaaatatcttggaaattgtaaagaactacacaaatataaggttttcctgtgattattaccgtcatcaagattaacctacagatagtgcaaaatttaagcttcccaaaaaatgttcgctaacctttttcatacttttagaccattacaagatataaatagcaaagtcaactgg

SEQ ID NO: 8495 - protein, 48 aa, Homo sapiens [sequence omitted]

SEQ ID NO: 8496 - DNA, 2724 bp, Homo sapiens
ccgctgcggagcgccggcccgtaggcgcgggagcctccctattaagggcacgcgacatcgaggcaatagtgcgcaggtgcttagccagaggcggagcccgagaggcaggcagcggacttccggttccgggagcaacgaacagccgcggaggcgacagctaccgcttcagaggaggcggccgcggaggaggaggaaggggaggagggcgaggcgggaggtgcaggagggaccctcgccatgggtccacgggcctagagtggcggaagataccggcctggtgccaaactggctactgctgcttcctgtggcctccatggctgaggactggctggactgcccggccctgggccctggctggaagcgccgcgaagtctttcgcaagtcaggggccacctgtggacgctcagacacctattaccagagccccacaggagacaggatccgaagcaaagttgagctgactcgatacctgggccctgcgtgtgatctcaccctcttcgacttcaaacaaggcatcttgtgctatccagcccccaaggcccatcccgtggcggttgccagcaagaagcgaaagaagccttcaaggccagccaagactcggaaacgtcaggttggaccccagagtggtgaggtcaggaaggaggccccgagggatgagaccaaggctgacactgacacagccccagcttcattccctgctcctgggtgctgtgagaactgtggaatcagcttctcaggggatggcacccaaaggcagcggctcaaaacgttgtgcaaagactgtcgagcacagagaattgccttcaaccgggaacagagaatgtttaagagccgagggtgtggagtatgccggggctgtcagacccaagaggattgtggccattgccccatctgccttcgccctccccgccctggtctcaggcgccagtggaaatgtgtccagcgacgttgcctacggggtaaacatgcccgccgcaagggaggctgtgactccaagatggctgccaggcggcgccccggagcccagccactgcctccaccacccccatcacagtccccagagcccacagagccgcaccccagagccctggccccctcgccacctgccgagttcatctattactgtgtagacgaggacgagctacagccctacacgaaccgccggcagaaccgcaagtgcggggcctgtgcagcctgcctacggcggatggactgtggccgctgcgacttctgctgcgacaagcccaaattcgggggcagcaaccagaagcgccagaagtgtcgttggcgccaatgcctgcagtttgccatgaagcggctgctgcccagtgtctggtcagagtctgaggatggggcaggatcgcccccaccttaccgtcgtcgaaagaggcccagctctgcccgacggcaccatcttggccctaccttgaagcccaccttggctacacgcacagcccaaccagaccatacccaggctccaacgaagcaggaagcaggtggtggctttgtgctgcccccgcctggcactgaccttgtgtttttacgggaaggcgcaagcagtcctgtgcaggtgccgggccctgttgcagcttccacagaagccctgttgcaggaggcccagtgctctggcctgagttgggttgtggccttaccccaggtgaagcaagagaaggcggatacccaggacgagtggacaccaggcacagctgtcctgacttctcccgtattggtgcctggctgccctagcaaggcagtagacccaggcctgccttctgtgaagcaagagccacctgacccagaggaggacaaggaggagaacaaggatgattctgcctccaaattggccccagaggaagaggcaggaggggctggcacacccgtgatcacggagattttcagcctgggtggaacccgcttccgagatacagcagtctggttgccaaggtattaccaccttgctcttgactggaaatgcaactgtggttaccacctgtgctgcaggtccgtcctggttccctgatttgtgtttcctgttctgcctggatcctgattctcagaaaccagttactggacttctgatccacatcctgaccctggtccactgtgaccctcagactcttaattatgctccaccaggtcgtgccactgccccactagtccatttgatctgcccccatcctaggatatcctgagtctaagccctggtttctgccaatggcaaataggaagattttattaacaggttttaaaaaattattattattactggttatttggtttgacaaggcacttaggctccctgagctttgccttagctggaaaataaggatagtattacttgctattctatcaaccctgtaagatatttgcggccacgcgcggtagcgcaccctgtaattccaacactttgggaggccggcgggaggggcagtggggaggatcgcttgaacccaggagcaggagttccagcctgagcaacatagcgggaccccctgtctcttcaaaatttgtttttaaattagcagggcgtggtggcgcaggctttgtagtcccagatactctggaggctgaggcccaggaggacgaggctgcagggagccatgatcacgccactgcactccaccctgggcgacagagcgagaccttgtctcagaaaaaatctgtgaggttaaaaggctgtgtgtgtgaaaatatcttggaaattgtaaagaactacacaaatat

SEQ ID NO: 8497 - protein, 568 aa, Homo sapiens
MAEDWLDCPALGPGWKRREVFRKSGATCGRSDTYYQSPTGDRIRSKVELTRYLGPACDLTLFDFKQGILCYPAPKAHPVAVASKKRKKPSRPAKTRKRQVGPQSGEVRKEAPRDETKADTDTAPASFPAPGCCENCGISFSGDGTQRQRLKTLCKDCRAQRIAFNREQRMFKSRGCGVCRGCQTQEDCGHCPICLRPPRPGLRRQWKCVQRRCLRGKHARRKGGCDSKMAARRRPGAQPLPPPPPSQSPEPTEPHPRALAPSPPAEFIYYCVDEDELQPYTNRRQNRKCGACAACLRRMDCGRCDFCCDKPKFGGSNQKRQKCRWRQCLQFAMKRLLPSVWSESEDGAGSPPPYRRRKRPSSARRHHLGPTLKPTLATRTAQPDHTQAPTKQEAGGGFVLPPPGTDLVFLREGASSPVQVPGPVAASTEALLQEAQCSGLSWVVALPQVKQEKADTQDEWTPGTAVLTSPVLVPGCPSKAVDPGLPSVKQEPPDPEEDKEENKDDSASKLAPEEEAGGAGTPVITEIFSLGGTRFRDTAVWLPRYYHLALDWKCNCGYHLCCRSVLVP

SEQ ID NO: 8498 - DNA, 4040 bp, Homo sapiens
ccgctgcggagcgccggcccgtaggcgcgggagcctccctattaagggcacgcgacatcgaggcaatagtgcgcaggtgcttagccagaggcggagcccgagaggcaggcagcggacttccggttccgggagcaacgaacagccgcggaggcgacagctaccgcttcagaggaggcggccgcggaggaggaggaaggggaggagggcgaggcgggaggtgcaggagggaccctcgccatgggtccacgggcctagagtggcggaagataccggcctggtgccaaactggctactgctgcttcctgtggcctccatggctgaggactggctggactgcccggccctgggccctggctggaagcgccgcgaagtctttcgcaagtcaggggccacctgtggacgctcagacacctattaccagagccccacaggagacaggatccgaagcaaagttgagctgactcgatacctgggccctgcgtgtgatctcaccctcttcgacttcaaacaaggcatcttgtgctatccagcccccaaggcccatcccgtggcggttgccagcaagaagcgaaagaagccttcaaggccagccaagactcggaaacgtcaggttggaccccagagtggtgaggtcaggaaggaggccccgagggatgagaccaaggctgacactgacacagccccagcttcattccctgctcctgggtgctgtgagaactgtggaatcagcttctcaggggatggcacccaaaggcagcggctcaaaacgttgtgcaaagactgtcgagcacagagaattgccttcaaccgggaacagagaatgtttaagcgtgtgggctgtggggagtgtgcagcctgccaggtaacagaagactgtggggcctgctccacctgcctcctgcagctgccccatgatgtggcatcggggctgttctgcaagtgtgaacggagacgctgcctccggattgtggaaaggagccgagggtgtggagtatgccggggctgtcagacccaagaggattgtggccattgccccatctgccttcgccctccccgccctggtctcaggcgccagtggaaatgtgtccagcgacgttgcctacggggtaaacatgcccgccgcaagggaggctgtgactccaagatggctgccaggcggcgccccggagcccagccactgcctccaccacccccatcacagtccccagagcccacagagccgcaccccagagccctggccccctcgccacctgccgagttcatctattactgtgtagacgaggacgagctacagccctacacgaaccgccggcagaaccgcaagtgcggggcctgtgcagcctgcctacggcggatggactgtggccgctgcgacttctgctgcgacaagcccaaattcgggggcagcaaccagaagcgccagaagtgtcgttggcgccaatgcctgcagtttgccatgaagcggctgctgcccagtgtctggtcagagtctgaggatggggcaggatcgcccccaccttaccgtcgtcgaaagaggcccagctctgcccgacggcaccatcttggccctaccttgaagcccaccttggctacacgcacagcccaaccagaccatacccaggctccaacgaagcaggaagcaggtggtggctttgtgctgcccccgcctggcactgaccttgtgtttttacgggaaggcgcaagcagtcctgtgcaggtgccgggccctgttgcagcttccacagaagccctgttgcaggcagtagacccaggcctgccttctgtgaagcaagagccacctgacccagaggaggacaaggaggagaacaaggatgattctgcctccaaattggccccagaggaagaggcaggaggggctggcacacccgtggaaccaaccacccaaccccagtattctggtaattttgacaatgatctatatgaaatttatttgattgacatttagactcatgagttaagcttctgctgaccatttatgttagggtacaatcagaggagcagaaccactaagataaagattatgtatatatgtattttaagggatttattatagggatctgaccgcatgccattgtgggagctggttaaacagtctctgtaaggctgttgtctttgcatctaatgctggagcttgaagtctgcagggcaggcactcgggaagggaagatggatgtaaagtgtgggagaccgaggacacagtggagcccacgagcacgagctggaacccacgaggatggcctggaacccatgtcagtctctcaccacctccagcttcgatgatgtgggtgtcctgcagaagaagctggtgcccttcctcacagagttaaatatgcatctggcccaggaattagagaagctgaaaggatgatcctggggaaggtggagcagctgcaggcctggctgcaggcctgactactgcccacaccaacgaggtgatctagcagatacatggcaacgtgtgaactgcaacaacgcctggtgccccagcaccaaccttccaagtgtaaaaacaatgtgctgctgcttcacttccgccctccggttatcaagcaaaatgtctcttgtggcccatcttactggaagagagttccgggaaacatagcctcaccaaggtgacacattacaaagccaccctaccatgaatccgctcccaagggtctcactgctcacctgaggataactcaatataactatgtggctgaaaatgcaaagctgaagaccatggatttcatggtgattccagcaagtacagagattctatgaagcccacccagaaaaaacttgctggtcctggctatttttgtgtcatttattcaagtattgagaacctggcctgtggtaggcactgtacttaatactaggatacagaaatgcaaaagatacggcccatgcaattttattaaatgcatcaatatgtattacaaatggtgaatggatttccaactttatcatggaatttaatgctgaatatatagaattcagaaaattgttgggaggacagcccttttgtgaaccttgtttggggcacagtaggaattggaaataatttagtttctatctctaagctgttctattttaaaattatttttaaatttttattgtcccacttacttacatgcttagtgtttcttttgggagtggtttggtgggaacagtgttgactgcctctgagaaactgggatagtgggtgggaagatcaaatcaaggtcacttctttccaaggaccctgagcgattcacttacctaggccgcgggggcggggggttggctgaaggctgaggctcttggtgctcagcactggccggacaccttcaacctgctggtgggtccgccagggggcgccggggcgagaaagcccgtagttcccagccacagtcacccaccggggccctggaggcaccgctcgtcacccatcacccctggcctggccgccctggggcgtggtctccgtccggcgcaaaccccagtacttgggctagggccagagggaagctgagtccccctcttcaaatagtggtaaaacaggcaaaaccgaaccggggttaaatttcggagctcgcccagggtgagggcggggctcgacgacctaggacgttcgagtgcggccgggtgtcgccaagggtcggtttaccccatcgcctcagaaattccgacgaggccctttgggctgcacaaccttgggaatccccaacgggcggccccgaatctgcgccgattttcccaagccgtacttcgggcccaaggcgttttcattgccgccttcccggaggatgtgtggtgggggtggttccgcccggaccgacgggcgggcccggagcccgttggactcgaagatcaaagaaccgcccctctggacactccaggaaaccgagacgaccacctaatttgtttgttttctgtttcaggccacgtaaactcttagtaaatgcaaatgcgtattttactgaactgcaattgaaagaaccgttatagaaaagaacacaaaatgacagaattattaaaagagaagaaaaacatta

SEQ ID NO: 8499 - protein, 550 aa, Homo sapiens
MAEDWLDCPALGPGWKRREVFRKSGATCGRSDTYYQSPTGDRIRSKVELTRYLGPACDLTLFDFKQGILCYPAPKAHPVAVASKKRKKPSRPAKTRKRQVGPQSGEVRKEAPRDETKADTDTAPASFPAPGCCENCGISFSGDGTQRQRLKTLCKDCRAQRIAFNREQRMFKRVGCGECAACQVTEDCGACSTCLLQLPHDVASGLFCKCERRRCLRIVERSRGCGVCRGCQTQEDCGHCPICLRPPRPGLRRQWKCVQRRCLRGKHARRKGGCDSKMAARRRPGAQPLPPPPPSQSPEPTEPHPRALAPSPPAEFIYYCVDEDELQPYTNRRQNRKCGACAACLRRMDCGRCDFCCDKPKFGGSNQKRQKCRWRQCLQFAMKRLLPSVWSESEDGAGSPPPYRRRKRPSSARRHHLGPTLKPTLATRTAQPDHTQAPTKQEAGGGFVLPPPGTDLVFLREGASSPVQVPGPVAASTEALLQAVDPGLPSVKQEPPDPEEDKEENKDDSASKLAPEEEAGGAGTPVEPTTQPQYSGNFDNDLYEIYLIDI

SEQ ID NO: 8500 - DNA, 3898 bp, Homo sapiens
ccgctgcggagcgccggcccgtaggcgcgggagcctccctattaagggcacgcgacatcgaggcaatagtgcgcaggtgcttagccagaggcggagcccgagaggcaggcagcggacttccggttccgggagcaacgaacagccgcggaggcgacagctaccgcttcagaggaggcggccgcggaggaggaggaaggggaggagggcgaggcgggaggtgcaggagggaccctcgccatgggtccacgggcctagagtggcggaagataccggcctggtgccaaactggctactgctgcttcctgtggcctccatggctgaggactggctggactgcccggccctgggccctggctggaagcgccgcgaagtctttcgcaagtcaggggccacctgtggacgctcagacacctattaccagagccccacaggagacaggatccgaagcaaagttgagctgactcgatacctgggccctgcgtgtgatctcaccctcttcgacttcaaacaaggcatcttgtgctatccagcccccaaggcccatcccgtggcggttgccagcaagaagcgaaagaagccttcaaggccagccaagactcggaaacgtcaggttggaccccagagtggtgaggtcaggaaggaggccccgagggatgagaccaaggctgacactgacacagccccagcttcattccctgctcctgggtgctgtgagaactgtggaatcagcttctcaggggatggcacccaaaggcagcggctcaaaacgttgtgcaaagactgtcgagcacagagaattgccttcaaccgggaacagagaatgtttaagagccgagggtgtggagtatgccggggctgtcagacccaagaggattgtggccattgccccatctgccttcgccctccccgccctggtctcaggcgccagtggaaatgtgtccagcgacgttgcctacggggtaaacatgcccgccgcaagggaggctgtgactccaagatggctgccaggcggcgccccggagcccagccactgcctccaccacccccatcacagtccccagagcccacagagccgcaccccagagccctggccccctcgccacctgccgagttcatctattactgtgtagacgaggacgagctacagccctacacgaaccgccggcagaaccgcaagtgcggggcctgtgcagcctgcctacggcggatggactgtggccgctgcgacttctgctgcgacaagcccaaattcgggggcagcaaccagaagcgccagaagtgtcgttggcgccaatgcctgcagtttgccatgaagcggctgctgcccagtgtctggtcagagtctgaggatggggcaggatcgcccccaccttaccgtcgtcgaaagaggcccagctctgcccgacggcaccatcttggccctaccttgaagcccaccttggctacacgcacagcccaaccagaccatacccaggctccaacgaagcaggaagcaggtggtggctttgtgctgcccccgcctggcactgaccttgtgtttttacgggaaggcgcaagcagtcctgtgcaggtgccgggccctgttgcagcttccacagaagccctgttgcaggaggcccagtgctctggcctgagttgggttgtggccttaccccaggtgaagcaagagaaggcggatacccaggacgagtggacaccaggcacagctgtcctgacttctcccgtattggtgcctggctgccctagcaaggcagtagacccaggcctgccttctgtgaagcaagagccacctgacccagaggaggacaaggaggagaacaaggatgattctgcctccaaattggccccagaggaagaggcaggaggggctggcacacccgtgatcacggagattttcagcctgggtggaacccgcttccgagatacagcagtctggttgccaaggtccaaagaccttaaaaaacctggagctagaaagcagtagactggaggcttctacagactgtaggattcaagtctgcagggcaggcactcgggaagggaagatggatgtaaagtgtgggagaccgaggacacagtggagcccacgagcacgagctggaacccacgaggatggcctggaacccatgtcagtctctcaccacctccagcttcgatgatgtgggtgtcctgcagaagaagctggtgcccttcctcacagagttaaatatgcatctggcccaggaattagagaagctgaaaggatgatcctggggaaggtggagcagctgcaggcctggctgcaggcctgactactgcccacaccaacgaggtgatctagcagatacatggcaacgtgtgaactgcaacaacgcctggtgccccagcaccaaccttccaagtgtaaaaacaatgtgctgctgcttcacttccgccctccggttatcaagcaaaatgtctcttgtggcccatcttactggaagagagttccgggaaacatagcctcaccaaggtgacacattacaaagccaccctaccatgaatccgctcccaagggtctcactgctcacctgaggataactcaatataactatgtggctgaaaatgcaaagctgaagaccatggatttcatggtgattccagcaagtacagagattctatgaagcccacccagaaaaaacttgctggtcctggctatttttgtgtcatttattcaagtattgagaacctggcctgtggtaggcactgtacttaatactaggatacagaaatgcaaaagatacggcccatgcaattttattaaatgcatcaatatgtattacaaatggtgaatggatttccaactttatcatggaatttaatgctgaatatatagaattcagaaaattgttgggaggacagcccttttgtgaaccttgtttggggcacagtaggaattggaaataatttagtttctatctctaagctgttctattttaaaattatttttaaatttttattgtcccacttacttacatgcttagtgtttcttttgggagtggtttggtgggaacagtgttgactgcctctgagaaactgggatagtgggtgggaagatcaaatcaaggtcacttctttccaaggaccctgagcgattcacttacctaggccgcgggggcggggggttggctgaaggctgaggctcttggtgctcagcactggccggacaccttcaacctgctggtgggtccgccagggggcgccggggcgagaaagcccgtagttcccagccacagtcacccaccggggccctggaggcaccgctcgtcacccatcacccctggcctggccgccctggggcgtggtctccgtccggcgcaaaccccagtacttgggctagggccagagggaagctgagtccccctcttcaaatagtggtaaaacaggcaaaaccgaaccggggttaaatttcggagctcgcccagggtgagggcggggctcgacgacctaggacgttcgagtgcggccgggtgtcgccaagggtcggtttaccccatcgcctcagaaattccgacgaggccctttgggctgcacaaccttgggaatccccaacgggcggccccgaatctgcgccgattttcccaagccgtacttcgggcccaaggcgttttcattgccgccttcccggaggatgtgtggtgggggtggttccgcccggaccgacgggcgggcccggagcccgttggactcgaagatcaaagaaccgcccctctggacactccaggaaaccgagacgaccacctaatttgtttgttttctgtttcaggccacgtaaactcttagtaaatgcaaatgcgtattttactgaactgcaattgaaagaaccgttatagaaaagaacacaaaatgacagaattattaaaagagaagaaaaacatta

SEQ ID NO: 8501 - protein, 556 aa, Homo sapiens; identical to SEQ ID NO: 1200

SEQ ID NO: 8502 - DNA, 3766 bp, Homo sapiens
ccgctgcggagcgccggcccgtaggcgcgggagcctccctattaagggcacgcgacatcgaggcaatagtgcgcaggtgcttagccagaggcggagcccgagaggcaggcagcggacttccggttccgggagcaacgaacagccgcggaggcgacagctaccgcttcagaggaggcggccgcggaggaggaggaaggggaggagggcgaggcgggaggtgcaggagggaccctcgccatgggtccacgggcctagagtggcggaagataccggcctggtgccaaactggctactgctgcttcctgtggcctccatggctgaggactggctggactgcccggccctgggccctggctggaagcgccgcgaagtctttcgcaagtcaggggccacctgtggacgctcagacacctattaccagagccccacaggagacaggatccgaagcaaagttgagctgactcgatacctgggccctgcgtgtgatctcaccctcttcgacttcaaacaaggcatcttgtgctatccagcccccaaggcccatcccgtggcggttgccagcaagaagcgaaagaagccttcaaggccagccaagactcggaaacgtcaggttggaccccagagtggtgaggtcaggaaggaggccccgagggatgagaccaaggctgacactgacacagccccagcttcattccctgctcctgggtgctgtgagaactgtggaatcagcttctcaggggatggcacccaaaggcagcggctcaaaacgttgtgcaaagactgtcgagcacagagaattgccttcaaccgggaacagagaatgtttaagcgtgtgggctgtggggagtgtgcagcctgccaggtaacagaagactgtggggcctgctccacctgcctcctgcagctgccccatgatgtggcatcggggctgttctgcaagtgtgaacggagacgctgcctccggattgtggaaaggagccgagggtgtggagtatgccggggctgtcagacccaagaggattgtggccattgccccatctgccttcgccctccccgccctggtctcaggcgccagtggaaatgtgtccagcgacgttgcctacggggtaaacatgcccgccgcaagggaggctgtgactccaagatggctgccaggcggcgccccggagcccagccactgcctccaccacccccatcacagtccccagagcccacagagccgcagccctacacgaaccgccggcagaaccgcaagtgcggggcctgtgcagcctgcctacggcggatggactgtggccgctgcgacttctgctgcgacaagcccaaattcgggggcagcaaccagaagcgccagaagtgtcgttggcgccaatgcctgcagtttgccatgaagcggctgctgcccagtgtctggtcagagtctgaggatggggcaggatcgcccccaccttaccgtcgtcgaaagaggcccagctctgcccgacggcaccatcttggccctaccttgaagcccaccttggctacacgcacagcccaaccagaccatacccaggctccaacgaagcaggaagcaggtggtggctttgtgctgcccccgcctggcactgaccttgtgtttttacgggaaggcgcaagcagtcctgtgcaggtgccgggccctgttgcagcttccacagaagccctgttgcaggcagtagacccaggcctgccttctgtgaagcaagagccacctgacccagaggaggacaaggaggagaacaaggatgattctgcctccaaattggccccagaggaagaggcaggaggggctggcacacccgtgatcacggagattttcagcctgggtggaacccgcttccgagatacagcagtctggttgccaagtctgcagggcaggcactcgggaagggaagatggatgtaaagtgtgggagaccgaggacacagtggagcccacgagcacgagctggaacccacgaggatggcctggaacccatgtcagtctctcaccacctccagcttcgatgatgtgggtgtcctgcagaagaagctggtgcccttcctcacagagttaaatatgcatctggcccaggaattagagaagctgaaaggatgatcctggggaaggtggagcagctgcaggcctggctgcaggcctgactactgcccacaccaacgaggtgatctagcagatacatggcaacgtgtgaactgcaacaacgcctggtgccccagcaccaaccttccaagtgtaaaaacaatgtgctgctgcttcacttccgccctccggttatcaagcaaaatgtctcttgtggcccatcttactggaagagagttccgggaaacatagcctcaccaaggtgacacattacaaagccaccctaccatgaatccgctcccaagggtctcactgctcacctgaggataactcaatataactatgtggctgaaaatgcaaagctgaagaccatggatttcatggtgattccagcaagtacagagattctatgaagcccacccagaaaaaacttgctggtcctggctatttttgtgtcatttattcaagtattgagaacctggcctgtggtaggcactgtacttaatactaggatacagaaatgcaaaagatacggcccatgcaattttattaaatgcatcaatatgtattacaaatggtgaatggatttccaactttatcatggaatttaatgctgaatatatagaattcagaaaattgttgggaggacagcccttttgtgaaccttgtttggggcacagtaggaattggaaataatttagtttctatctctaagctgttctattttaaaattatttttaaatttttattgtcccacttacttacatgcttagtgtttcttttgggagtggtttggtgggaacagtgttgactgcctctgagaaactgggatagtgggtgggaagatcaaatcaaggtcacttctttccaaggaccctgagcgattcacttacctaggccgcgggggcggggggttggctgaaggctgaggctcttggtgctcagcactggccggacaccttcaacctgctggtgggtccgccagggggcgccggggcgagaaagcccgtagttcccagccacagtcacccaccggggccctggaggcaccgctcgtcacccatcacccctggcctggccgccctggggcgtggtctccgtccggcgcaaaccccagtacttgggctagggccagagggaagctgagtccccctcttcaaatagtggtaaaacaggcaaaaccgaaccggggttaaatttcggagctcgcccagggtgagggcggggctcgacgacctaggacgttcgagtgcggccgggtgtcgccaagggtcggtttaccccatcgcctcagaaattccgacgaggccctttgggctgcacaaccttgggaatccccaacgggcggccccgaatctgcgccgattttcccaagccgtacttcgggcccaaggcgttttcattgccgccttcccggaggatgtgtggtgggggtggttccgcccggaccgacgggcgggcccggagcccgttggactcgaagatcaaagaaccgcccctctggacactccaggaaaccgagacgaccacctaatttgtttgttttctgtttcaggccacgtaaactcttagtaaatgcaaatgcgtattttactgaactgcaattgaaagaaccgttatagaaaagaacacaaaatgacagaattattaaaagagaagaaaaacatta

SEQ ID NO: 8503 - protein, 586 aa, Homo sapiens; identical to SEQ ID NO: 1196

SEQ ID NO: 8504 - DNA, 3877 bp, Homo sapiens
ccgctgcggagcgccggcccgtaggcgcgggagcctccctattaagggcacgcgacatcgaggcaatagtgcgcaggtgcttagccagaggcggagcccgagaggcaggcagcggacttccggttccgggagcaacgaacagccgcggaggcgacagctaccgcttcagaggaggcggccgcggaggaggaggaaggggaggagggcgaggcgggaggtgcaggagggaccctcgccatgggtccacgggcctagagtggcggaagataccggcctggtgccaaactggctactgctgcttcctgtggcctccatggctgaggactggctggactgcccggccctgggccctggctggaagcgccgcgaagtctttcgcaagtcaggggccacctgtggacgctcagacacctattaccagagccccacaggagacaggatccgaagcaaagttgagctgactcgatacctgggccctgcgtgtgatctcaccctcttcgacttcaaacaaggcatcttgtgctatccagcccccaaggcccatcccgtggcggttgccagcaagaagcgaaagaagccttcaaggccagccaagactcggaaacgtcaggttggaccccagagtggtgaggtcaggaaggaggccccgagggatgagaccaaggctgacactgacacagccccagcttcattccctgctcctgggtgctgtgagaactgtggaatcagcttctcaggggatggcacccaaaggcagcggctcaaaacgttgtgcaaagactgtcgagcacagagaattgccttcaaccgggaacagagaatgtttaagcgtgtgggctgtggggagtgtgcagcctgccaggtaacagaagactgtggggcctgctccacctgcctcctgcagctgccccatgatgtggcatcggggctgttctgcaagtgtgaacggagacgctgcctccggattgtggaaaggagccgagggtgtggagtatgccggggctgtcagacccaagaggattgtggccattgccccatctgccttcgccctccccgccctggtctcaggcgccagtggaaatgtgtccagcgacgttgcctacggggtaaacatgcccgccgcaagggaggctgtgactccaagatggctgccaggcggcgccccggagcccagccactgcctccaccacccccatcacagtccccagagcccacagagccgcaccccagagccctggccccctcgccacctgccgagttcatctattactgtgtagacgaggacgagctaaagcggctgctgcccagtgtctggtcagagtctgaggatggggcaggatcgcccccaccttaccgtcgtcgaaagaggcccagctctgcccgacggcaccatcttggccctaccttgaagcccaccttggctacacgcacagcccaaccagaccatacccaggctccaacgaagcaggaagcaggtggtggctttgtgctgcccccgcctggcactgaccttgtgtttttacgggaaggcgcaagcagtcctgtgcaggtgccgggccctgttgcagcttccacagaagccctgttgcaggaggcccagtgctctggcctgagttgggttgtggccttaccccaggtgaagcaagagaaggcggatacccaggacgagtggacaccaggcacagctgtcctgacttctcccgtattggtgcctggctgccctagcaaggcagtagacccaggcctgccttctgtgaagcaagagccacctgacccagaggaggacaaggaggagaacaaggatgattctgcctccaaattggccccagaggaagaggcaggaggggctggcacacccgtgatcacggagattttcagcctgggtggaacccgcttccgagatacagcagtctggttgccaaggtccaaagaccttaaaaaacctggagctagaaagcagtagactggaggcttctacagactgtaggattcaagtctgcagggcaggcactcgggaagggaagatggatgtaaagtgtgggagaccgaggacacagtggagcccacgagcacgagctggaacccacgaggatggcctggaacccatgtcagtctctcaccacctccagcttcgatgatgtgggtgtcctgcagaagaagctggtgcccttcctcacagagttaaatatgcatctggcccaggaattagagaagctgaaaggatgatcctggggaaggtggagcagctgcaggcctggctgcaggcctgactactgcccacaccaacgaggtgatctagcagatacatggcaacgtgtgaactgcaacaacgcctggtgccccagcaccaaccttccaagtgtaaaaacaatgtgctgctgcttcacttccgccctccggttatcaagcaaaatgtctcttgtggcccatcttactggaagagagttccgggaaacatagcctcaccaaggtgacacattacaaagccaccctaccatgaatccgctcccaagggtctcactgctcacctgaggataactcaatataactatgtggctgaaaatgcaaagctgaagaccatggatttcatggtgattccagcaagtacagagattctatgaagcccacccagaaaaaacttgctggtcctggctatttttgtgtcatttattcaagtattgagaacctggcctgtggtaggcactgtacttaatactaggatacagaaatgcaaaagatacggcccatgcaattttattaaatgcatcaatatgtattacaaatggtgaatggatttccaactttatcatggaatttaatgctgaatatatagaattcagaaaattgttgggaggacagcccttttgtgaaccttgtttggggcacagtaggaattggaaataatttagtttctatctctaagctgttctattttaaaattatttttaaatttttattgtcccacttacttacatgcttagtgtttcttttgggagtggtttggtgggaacagtgttgactgcctctgagaaactgggatagtgggtgggaagatcaaatcaaggtcacttctttccaaggaccctgagcgattcacttacctaggccgcgggggcggggggttggctgaaggctgaggctcttggtgctcagcactggccggacaccttcaacctgctggtgggtccgccagggggcgccggggcgagaaagcccgtagttcccagccacagtcacccaccggggccctggaggcaccgctcgtcacccatcacccctggcctggccgccctggggcgtggtctccgtccggcgcaaaccccagtacttgggctagggccagagggaagctgagtccccctcttcaaatagtggtaaaacaggcaaaaccgaaccggggttaaatttcggagctcgcccagggtgagggcggggctcgacgacctaggacgttcgagtgcggccgggtgtcgccaagggtcggtttaccccatcgcctcagaaattccgacgaggccctttgggctgcacaaccttgggaatccccaacgggcggccccgaatctgcgccgattttcccaagccgtacttcgggcccaaggcgttttcattgccgccttcccggaggatgtgtggtgggggtggttccgcccggaccgacgggcgggcccggagcccgttggactcgaagatcaaagaaccgcccctctggacactccaggaaaccgagacgaccacctaatttgtttgttttctgtttcaggccacgtaaactcttagtaaatgcaaatgcgtattttactgaactgcaattgaaagaaccgttatagaaaagaacacaaaatgacagaattattaaaagagaagaaaaacatta

SEQ ID NO: 8505 - protein, 549 aa, Homo sapiens
MAEDWLDCPALGPGWKRREVFRKSGATCGRSDTYYQSPTGDRIRSKVELTRYLGPACDLTLFDFKQGILCYPAPKAHPVAVASKKRKKPSRPAKTRKRQVGPQSGEVRKEAPRDETKADTDTAPASFPAPGCCENCGISFSGDGTQRQRLKTLCKDCRAQRIAFNREQRMFKRVGCGECAACQVTEDCGACSTCLLQLPHDVASGLFCKCERRRCLRIVERSRGCGVCRGCQTQEDCGHCPICLRPPRPGLRRQWKCVQRRCLRGKHARRKGGCDSKMAARRRPGAQPLPPPPPSQSPEPTEPHPRALAPSPPAEFIYYCVDEDELKRLLPSVWSESEDGAGSPPPYRRRKRPSSARRHHLGPTLKPTLATRTAQPDHTQAPTKQEAGGGFVLPPPGTDLVFLREGASSPVQVPGPVAASTEALLQEAQCSGLSWVVALPQVKQEKADTQDEWTPGTAVLTSPVLVPGCPSKAVDPGLPSVKQEPPDPEEDKEENKDDSASKLAPEEEAGGAGTPVITEIFSLGGTRFRDTAVWLPRSKDLKKPGARKQ

SEQ ID NO: 8506 - DNA, 4045 bp, Homo sapiens
ccgctgcggagcgccggcccgtaggcgcgggagcctccctattaagggcacgcgacatcgaggcaatagtgcgcaggtgcttagccagaggcggagcccgagaggcaggcagcggacttccggttccgggagcaacgaacagccgcggaggcgacagctaccgcttcagaggaggcggccgcggaggaggaggaaggggaggagggcgaggcgggaggtgcaggagggaccctcgccatgggtccacgggcctagagtggcggaagataccggcctggtgccaaactggctactgctgcttcctgtggcctccatggctgaggactggctggactgcccggccctgggccctggctggaagcgccgcgaagtctttcgcaagtcaggggccacctgtggacgctcagacacctattaccagagccccacaggagacaggatccgaagcaaagttgagctgactcgatacctgggccctgcgtgtgatctcaccctcttcgacttcaaacaaggcatcttgtgctatccagcccccaaggcccatcccgtggcggttgccagcaagaagcgaaagaagccttcaaggccagccaagactcggaaacgtcaggttggaccccagagtggtgaggtcaggaaggaggccccgagggatgagaccaaggctgacactgacacagccccagcttcattccctgctcctgggtgctgtgagaactgtggaatcagcttctcaggggatggcacccaaaggcagcggctcaaaacgttgtgcaaagactgtcgagcacagagaattgccttcaaccgggaacagagaatgtttaagcgtgtgggctgtggggagtgtgcagcctgccaggtaacagaagactgtggggcctgctccacctgcctcctgcagctgccccatgatgtggcatcggggctgttctgcaagtgtgaacggagacgctgcctccggattgtggaaaggagccgagggtgtggagtatgccggggctgtcagacccaagaggattgtggccattgccccatctgccttcgccctccccgccctggtctcaggcgccagtggaaatgtgtccagcgacgttgcctacggggtaaacatgcccgccgcaagggaggctgtgactccaagatggctgccaggcggcgccccggagcccagccactgcctccaccacccccatcacagtccccagagcccacagagccgcaccccagagccctggccccctcgccacctgccgagttcatctattactgtgtagacgaggacgagctacagccctacacgaaccgccggcagaaccgcaagtgcggggcctgtgcagcctgcctacggcggatggactgtggccgctgcgacttctgctgcgacaagcccaaattcgggggcagcaaccagaagcgccagaagtgtcgttggcgccaatgcctgcagtttgccatgaagcggctgctgcccagtgtctggtcagagtctgaggatggggcaggatcgcccccaccttaccgtcgtcgaaagaggcccagctctgcccgacggcaccatcttggccctaccttgaagcccaccttggctacacgcacagcccaaccagaccatacccaggctccaacgaagcaggaagcaggtggtggctttgtgctgcccccgcctggcactgaccttgtgtttttacgggaaggcgcaagcagtcctgtgcaggtgccgggccctgttgcagcttccacagaagccctgttgcaggaggcccagtgctctggcctgagttgggttgtggccttaccccaggtgaagcaagagaaggcggatacccaggacgagtggacaccaggcacagctgtcctgacttctcccgtattggtgcctggctgccctagcaaggcagtagacccaggcctgccttctgtgaagcaagagccacctgacccagaggaggacaaggaggagaacaaggatgattctgcctccaaattggccccagaggaagaggcaggaggggctggcacacccgtgatcacggagattttcagcctgggtggaacccgcttccgagatacagcagtctggttgccaaggtccaaagaccttaaaaaacctggagctagaaagcagtagactggaggcttctacagactgtaggattcaagtctgcagggcaggcactcgggaagggaagatggatgtaaagtgtgggagaccgaggacacagtggagcccacgagcacgagctggaacccacgaggatggcctggaacccatgtcagtctctcaccacctccagcttcgatgatgtgggtgtcctgcagaagaagctggtgcccttcctcacagagttaaatatgcatctggcccaggaattagagaagctgaaaggatgatcctggggaaggtggagcagctgcaggcctggctgcaggcctgactactgcccacaccaacgaggtgatctagcagatacatggcaacgtgtgaactgcaacaacgcctggtgccccagcaccaaccttccaagtgtaaaaacaatgtgctgctgcttcacttccgccctccggttatcaagcaaaatgtctcttgtggcccatcttactggaagagagttccgggaaacatagcctcaccaaggtgacacattacaaagccaccctaccatgaatccgctcccaagggtctcactgctcacctgaggataactcaatataactatgtggctgaaaatgcaaagctgaagaccatggatttcatggtgattccagcaagtacagagattctatgaagcccacccagaaaaaacttgctggtcctggctatttttgtgtcatttattcaagtattgagaacctggcctgtggtaggcactgtacttaatactaggatacagaaatgcaaaagatacggcccatgcaattttattaaatgcatcaatatgtattacaaatggtgaatggatttccaactttatcatggaatttaatgctgaatatatagaattcagaaaattgttgggaggacagcccttttgtgaaccttgtttggggcacagtaggaattggaaataatttagtttctatctctaagctgttctattttaaaattatttttaaatttttattgtcccacttacttacatgcttagtgtttcttttgggagtggtttggtgggaacagtgttgactgcctctgagaaactgggatagtgggtgggaagatcaaatcaaggtcacttctttccaaggaccctgagcgattcacttacctaggccgcgggggcggggggttggctgaaggctgaggctcttggtgctcagcactggccggacaccttcaacctgctggtgggtccgccagggggcgccggggcgagaaagcccgtagttcccagccacagtcacccaccggggccctggaggcaccgctcgtcacccatcacccctggcctggccgccctggggcgtggtctccgtccggcgcaaaccccagtacttgggctagggccagagggaagctgagtccccctcttcaaatagtggtaaaacaggcaaaaccgaaccggggttaaatttcggagctcgcccagggtgagggcggggctcgacgacctaggacgttcgagtgcggccgggtgtcgccaagggtcggtttaccccatcgcctcagaaattccgacgaggccctttgggctgcacaaccttgggaatccccaacgggcggccccgaatctgcgccgattttcccaagccgtacttcgggcccaaggcgttttcattgccgccttcccggaggatgtgtggtgggggtggttccgcccggaccgacgggcgggcccggagcccgttggactcgaagatcaaagaaccgcccctctggacactccaggaaaccgagacgaccacctaatttgtttgttttctgtttcaggccacgtaaactcttagtaaatgcaaatgcgtattttactgaactgcaattgaaagaaccgttatagaaaagaacacaaaatgacagaattattaaaagagaagaaaaacatta

SEQ ID NO: 8507 - protein, 605 aa, Homo sapiens; identical to SEQ ID NO: 1198

SEQ ID NO: 8508 - DNA, 3739 bp, Homo sapiens
ccgctgcggagcgccggcccgtaggcgcgggagcctccctattaagggcacgcgacatcgaggcaatagtgcgcaggtgcttagccagaggcggagcccgagaggcaggcagcggacttccggttccgggagcaacgaacagccgcggaggcgacagctaccgcttcagaggaggcggccgcggaggaggaggaaggggaggagggcgaggcgggaggtgcaggagggaccctcgccatgggtccacgggcctagagtggcggaagataccggcctggtgccaaactggctactgctgcttcctgtggcctccatggctgaggactggctggactgcccggccctgggccctggctggaagcgccgcgaagtctttcgcaagtcaggggccacctgtggacgctcagacacctattaccagagccccacaggagacaggatccgaagcaaagttgagctgactcgatacctgggccctgcgtgtgatctcaccctcttcgacttcaaacaaggcatcttgtgctatccagcccccaaggcccatcccgtggcggttgccagcaagaagcgaaagaagccttcaaggccagccaagactcggaaacgtcaggttggaccccagagtggtgaggtcaggaaggaggccccgagggatgagaccaaggctgacactgacacagccccagcttcattccctgctcctgggtgctgtgagaactgtggaatcagcttctcaggggatggcacccaaaggcagcggctcaaaacgttgtgcaaagactgtcgagcacagagaattgccttcaaccgggaacagagaatgtttaagcgtgtgggctgtggggagtgtgcagcctgccaggtaacagaagactgtggggcctgctccacctgcctcctgcagctgccccatgatgtggcatcggggctgttctgcaagtgtgaacggagacgctgcctccggattgtggaaaggagccgagggtgtggagtatgccggggctgtcagacccaagaggattgtggccattgccccatctgccttcgccctccccgccctggtctcaggcgccagtggaaatgtgtccagcgacgttgcctacggggtaaacatgcccgccgcaagggaggctgtgactccaagatggctgccaggcggcgccccggagcccagccactgcctccaccacccccatcacagtccccagagcccacagagccgcaccccagagccctggccccctcgccacctgccgagttcatctattactgtgtagacgaggacgagctaaagcggctgctgcccagtgtctggtcagagtctgaggatggggcaggatcgcccccaccttaccgtcgtcgaaagaggcccagctctgcccgacggcaccatcttggccctaccttgaagcccaccttggctacacgcacagcccaaccagaccatacccaggctccaacgaagcaggaagcaggtggtggctttgtgctgcccccgcctggcactgaccttgtgtttttacgggaaggcgcaagcagtcctgtgcaggtgccgggccctgttgcagcttccacagaagccctgttgcaggcagtagacccaggcctgccttctgtgaagcaagagccacctgacccagaggaggacaaggaggagaacaaggatgattctgcctccaaattggccccagaggaagaggcaggaggggctggcacacccgtgatcacggagattttcagcctgggtggaacccgcttccgagatacagcagtctggttgccaaggtccaaagaccttaaaaaacctggagctagaaagcagtagactggaggcttctacagactgtaggattcaagtctgcagggcaggcactcgggaagggaagatggatgtaaagtgtgggagaccgaggacacagtggagcccacgagcacgagctggaacccacgaggatggcctggaacccatgtcagtctctcaccacctccagcttcgatgatgtgggtgtcctgcagaagaagctggtgcccttcctcacagagttaaatatgcatctggcccaggaattagagaagctgaaaggatgatcctggggaaggtggagcagctgcaggcctggctgcaggcctgactactgcccacaccaacgaggtgatctagcagatacatggcaacgtgtgaactgcaacaacgcctggtgccccagcaccaaccttccaagtgtaaaaacaatgtgctgctgcttcacttccgccctccggttatcaagcaaaatgtctcttgtggcccatcttactggaagagagttccgggaaacatagcctcaccaaggtgacacattacaaagccaccctaccatgaatccgctcccaagggtctcactgctcacctgaggataactcaatataactatgtggctgaaaatgcaaagctgaagaccatggatttcatggtgattccagcaagtacagagattctatgaagcccacccagaaaaaacttgctggtcctggctatttttgtgtcatttattcaagtattgagaacctggcctgtggtaggcactgtacttaatactaggatacagaaatgcaaaagatacggcccatgcaattttattaaatgcatcaatatgtattacaaatggtgaatggatttccaactttatcatggaatttaatgctgaatatatagaattcagaaaattgttgggaggacagcccttttgtgaaccttgtttggggcacagtaggaattggaaataatttagtttctatctctaagctgttctattttaaaattatttttaaatttttattgtcccacttacttacatgcttagtgtttcttttgggagtggtttggtgggaacagtgttgactgcctctgagaaactgggatagtgggtgggaagatcaaatcaaggtcacttctttccaaggaccctgagcgattcacttacctaggccgcgggggcggggggttggctgaaggctgaggctcttggtgctcagcactggccggacaccttcaacctgctggtgggtccgccagggggcgccggggcgagaaagcccgtagttcccagccacagtcacccaccggggccctggaggcaccgctcgtcacccatcacccctggcctggccgccctggggcgtggtctccgtccggcgcaaaccccagtacttgggctagggccagagggaagctgagtccccctcttcaaatagtggtaaaacaggcaaaaccgaaccggggttaaatttcggagctcgcccagggtgagggcggggctcgacgacctaggacgttcgagtgcggccgggtgtcgccaagggtcggtttaccccatcgcctcagaaattccgacgaggccctttgggctgcacaaccttgggaatccccaacgggcggccccgaatctgcgccgattttcccaagccgtacttcgggcccaaggcgttttcattgccgccttcccggaggatgtgtggtgggggtggttccgcccggaccgacgggcgggcccggagcccgttggactcgaagatcaaagaaccgcccctctggacactccaggaaaccgagacgaccacctaatttgtttgttttctgtttcaggccacgtaaactcttagtaaatgcaaatgcgtattttactgaactgcaattgaaagaaccgttatagaaaagaacacaaaatgacagaattattaaaagagaagaaaaacatta

SEQ ID NO: 8509 - protein, 503 aa, Homo sapiens; identical to SEQ ID NO: 1192

SEQ ID NO: 8510 - DNA, 2992 bp, Homo sapiens
ccgctgcggagcgccggcccgtaggcgcgggagcctccctattaagggcacgcgacatcgaggcaatagtgcgcaggtgcttagccagaggcggagcccgagaggcaggcagcggacttccggttccgggagcaacgaacagccgcggaggcgacagctaccgcttcagaggaggcggccgcggaggaggaggaaggggaggagggcgaggcgggaggtgcaggagggaccctcgccatgggtccacgggcctagagtggcggaagataccggcctggtgccaaactggctactgctgcttcctgtggcctccatggctgaggactggctggactgcccggccctgggccctggctggaagcgccgcgaagtctttcgcaagtcaggggccacctgtggacgctcagacacctattaccagagccccacaggagacaggatccgaagcaaagttgagctgactcgatacctgggccctgcgtgtgatctcaccctcttcgacttcaaacaaggcatcttgtgctatccagcccccaaggcccatcccgtggcggttgccagcaagaagcgaaagaagccttcaaggccagccaagactcggaaacgtcaggttggaccccagagtggtgaggtcaggaaggaggccccgagggatgagaccaaggctgacactgacacagccccagcttcattccctgctcctgggtgctgtgagaactgtggaatcagcttctcaggggatggcacccaaaggcagcggctcaaaacgttgtgcaaagactgtcgagcacagagaattgccttcaaccgggaacagagaatgtttaagagccgagggtgtggagtatgccggggctgtcagacccaagaggattgtggccattgccccatctgccttcgccctccccgccctggtctcaggcgccagtggaaatgtgtccagcgacgttgcctacggggtaaacatgcccgccgcaagggaggctgtgactccaagatggctgccaggcggcgccccggagcccagccactgcctccaccacccccatcacagtccccagagcccacagagccgcaccccagagccctggccccctcgccacctgccgagttcatctattactgtgtagacgaggacgagctacagccctacacgaaccgccggcagaaccgcaagtgcggggcctgtgcagcctgcctacggcggatggactgtggccgctgcgacttctgctgcgacaagcccaaattcgggggcagcaaccagaagcgccagaagtgtcgttggcgccaatgcctgcagtttgccatgaagcggctgctgcccagtgtctggtcagagtctgaggatggggcaggatcgcccccaccttaccgtcgtcgaaagaggcccagctctgcccgacggcaccatcttggccctaccttgaagcccaccttggctacacgcacagcccaaccagaccatacccaggctccaacgaagcaggaagcaggtggtggctttgtgctgcccccgcctggcactgaccttgtgtttttacgggaaggcgcaagcagtcctgtgcaggtgccgggccctgttgcagcttccacagaagccctgttgcaggaggcccagtgctctggcctgagttgggttgtggccttaccccaggtgaagcaagagaaggcggatacccaggacgagtggacaccaggcacagctgtcctgacttctcccgtattggtgcctggctgccctagcaaggcagtagacccaggcctgccttctgtgaagcaagagccacctgacccagaggaggacaaggaggagaacaaggatgattctgcctccaaattggccccagaggaagaggcaggaggggctggcacacccgtgatcacggagattttcagcctgggtggaacccgcttccgagatacagcagtctggttgccaaggtccaaagaccttaaaaaacctggagctagaaagcagtagactggaggcttctacagactgtaggattcaagtctgcagggcaggcactcgggaagggaagatggatgtaaagtgtgggagaccgaggacacagtggagcccacgagcacgagctggaacccacgaggatggcctggaacccatgtcagtctctcaccacctccagcttcgatgatgtgggtgtcctgcagaagaagctggtgcccttcctcacagagttaaatatgcatctggcccaggaattagagaagctgaaaggatgatcctggggaaggtggagcagctgcaggcctggctgcaggcctgactactgcccacaccaacgaggtgatctagcagatacatggcaacgtgtgaactgcaacaacgcctggtgccccagcaccaaccttccaagtgtaaaaacaatgtgctgctgcttcacttccgccctccggttatcaagcaaaatgtctcttgtggcccatcttactggaagagagttccgggaaacatagcctcaccaaggtgacacattacaaagccaccctaccatgaatccgctcccaagggtctcactgctcacctgaggataactcaatataactatgtggctgaaaatgcaaagctgaagaccatggatttcatggtgattccagcaagtacagagattctatgaagcccacccagaaaaaacttgctggtcctggctatttttgtgtcatttattcaagtattgagaacctggcctgtggtaggcactgtacttaatactaggatacagaaatgcaaaagatacggcccatgcaattttattaaatgcatcaatatgtattacaaatggtgaatggatttccaactttatcatggaatttaatgctgaatatatagaattcagaaaattgttgggaggacagcccttttgtgaaccttgtttggggcacagtaggaattggaaataatttagtttctatctctaagctgttctattttaaaattatttttaaatttttattgtcccacttactt

SEQ ID NO: 8511 - protein, 556 aa, Homo sapiens; identical to SEQ ID NO: 1200

SEQ ID NO: 8512 - DNA, 2860 bp, Homo sapiens
ccgctgcggagcgccggcccgtaggcgcgggagcctccctattaagggcacgcgacatcgaggcaatagtgcgcaggtgcttagccagaggcggagcccgagaggcaggcagcggacttccggttccgggagcaacgaacagccgcggaggcgacagctaccgcttcagaggaggcggccgcggaggaggaggaaggggaggagggcgaggcgggaggtgcaggagggaccctcgccatgggtccacgggcctagagtggcggaagataccggcctggtgccaaactggctactgctgcttcctgtggcctccatggctgaggactggctggactgcccggccctgggccctggctggaagcgccgcgaagtctttcgcaagtcaggggccacctgtggacgctcagacacctattaccagagccccacaggagacaggatccgaagcaaagttgagctgactcgatacctgggccctgcgtgtgatctcaccctcttcgacttcaaacaaggcatcttgtgctatccagcccccaaggcccatcccgtggcggttgccagcaagaagcgaaagaagccttcaaggccagccaagactcggaaacgtcaggttggaccccagagtggtgaggtcaggaaggaggccccgagggatgagaccaaggctgacactgacacagccccagcttcattccctgctcctgggtgctgtgagaactgtggaatcagcttctcaggggatggcacccaaaggcagcggctcaaaacgttgtgcaaagactgtcgagcacagagaattgccttcaaccgggaacagagaatgtttaagcgtgtgggctgtggggagtgtgcagcctgccaggtaacagaagactgtggggcctgctccacctgcctcctgcagctgccccatgatgtggcatcggggctgttctgcaagtgtgaacggagacgctgcctccggattgtggaaaggagccgagggtgtggagtatgccggggctgtcagacccaagaggattgtggccattgccccatctgccttcgccctccccgccctggtctcaggcgccagtggaaatgtgtccagcgacgttgcctacggggtaaacatgcccgccgcaagggaggctgtgactccaagatggctgccaggcggcgccccggagcccagccactgcctccaccacccccatcacagtccccagagcccacagagccgcagccctacacgaaccgccggcagaaccgcaagtgcggggcctgtgcagcctgcctacggcggatggactgtggccgctgcgacttctgctgcgacaagcccaaattcgggggcagcaaccagaagcgccagaagtgtcgttggcgccaatgcctgcagtttgccatgaagcggctgctgcccagtgtctggtcagagtctgaggatggggcaggatcgcccccaccttaccgtcgtcgaaagaggcccagctctgcccgacggcaccatcttggccctaccttgaagcccaccttggctacacgcacagcccaaccagaccatacccaggctccaacgaagcaggaagcaggtggtggctttgtgctgcccccgcctggcactgaccttgtgtttttacgggaaggcgcaagcagtcctgtgcaggtgccgggccctgttgcagcttccacagaagccctgttgcaggcagtagacccaggcctgccttctgtgaagcaagagccacctgacccagaggaggacaaggaggagaacaaggatgattctgcctccaaattggccccagaggaagaggcaggaggggctggcacacccgtgatcacggagattttcagcctgggtggaacccgcttccgagatacagcagtctggttgccaagtctgcagggcaggcactcgggaagggaagatggatgtaaagtgtgggagaccgaggacacagtggagcccacgagcacgagctggaacccacgaggatggcctggaacccatgtcagtctctcaccacctccagcttcgatgatgtgggtgtcctgcagaagaagctggtgcccttcctcacagagttaaatatgcatctggcccaggaattagagaagctgaaaggatgatcctggggaaggtggagcagctgcaggcctggctgcaggcctgactactgcccacaccaacgaggtgatctagcagatacatggcaacgtgtgaactgcaacaacgcctggtgccccagcaccaaccttccaagtgtaaaaacaatgtgctgctgcttcacttccgccctccggttatcaagcaaaatgtctcttgtggcccatcttactggaagagagttccgggaaacatagcctcaccaaggtgacacattacaaagccaccctaccatgaatccgctcccaagggtctcactgctcacctgaggataactcaatataactatgtggctgaaaatgcaaagctgaagaccatggatttcatggtgattccagcaagtacagagattctatgaagcccacccagaaaaaacttgctggtcctggctatttttgtgtcatttattcaagtattgagaacctggcctgtggtaggcactgtacttaatactaggatacagaaatgcaaaagatacggcccatgcaattttattaaatgcatcaatatgtattacaaatggtgaatggatttccaactttatcatggaatttaatgctgaatatatagaattcagaaaattgttgggaggacagcccttttgtgaaccttgtttggggcacagtaggaattggaaataatttagtttctatctctaagctgttctattttaaaattatttttaaatttttattgtcccacttactt

SEQ ID NO: 8513 - protein, 586 aa, Homo sapiens; identical to SEQ ID NO: 1196

SEQ ID NO: 8514 - DNA, 2971 bp, Homo sapiens
ccgctgcggagcgccggcccgtaggcgcgggagcctccctattaagggcacgcgacatcgaggcaatagtgcgcaggtgcttagccagaggcggagcccgagaggcaggcagcggacttccggttccgggagcaacgaacagccgcggaggcgacagctaccgcttcagaggaggcggccgcggaggaggaggaaggggaggagggcgaggcgggaggtgcaggagggaccctcgccatgggtccacgggcctagagtggcggaagataccggcctggtgccaaactggctactgctgcttcctgtggcctccatggctgaggactggctggactgcccggccctgggccctggctggaagcgccgcgaagtctttcgcaagtcaggggccacctgtggacgctcagacacctattaccagagccccacaggagacaggatccgaagcaaagttgagctgactcgatacctgggccctgcgtgtgatctcaccctcttcgacttcaaacaaggcatcttgtgctatccagcccccaaggcccatcccgtggcggttgccagcaagaagcgaaagaagccttcaaggccagccaagactcggaaacgtcaggttggaccccagagtggtgaggtcaggaaggaggccccgagggatgagaccaaggctgacactgacacagccccagcttcattccctgctcctgggtgctgtgagaactgtggaatcagcttctcaggggatggcacccaaaggcagcggctcaaaacgttgtgcaaagactgtcgagcacagagaattgccttcaaccgggaacagagaatgtttaagcgtgtgggctgtggggagtgtgcagcctgccaggtaacagaagactgtggggcctgctccacctgcctcctgcagctgccccatgatgtggcatcggggctgttctgcaagtgtgaacggagacgctgcctccggattgtggaaaggagccgagggtgtggagtatgccggggctgtcagacccaagaggattgtggccattgccccatctgccttcgccctccccgccctggtctcaggcgccagtggaaatgtgtccagcgacgttgcctacggggtaaacatgcccgccgcaagggaggctgtgactccaagatggctgccaggcggcgccccggagcccagccactgcctccaccacccccatcacagtccccagagcccacagagccgcaccccagagccctggccccctcgccacctgccgagttcatctattactgtgtagacgaggacgagctaaagcggctgctgcccagtgtctggtcagagtctgaggatggggcaggatcgcccccaccttaccgtcgtcgaaagaggcccagctctgcccgacggcaccatcttggccctaccttgaagcccaccttggctacacgcacagcccaaccagaccatacccaggctccaacgaagcaggaagcaggtggtggctttgtgctgcccccgcctggcactgaccttgtgtttttacgggaaggcgcaagcagtcctgtgcaggtgccgggccctgttgcagcttccacagaagccctgttgcaggaggcccagtgctctggcctgagttgggttgtggccttaccccaggtgaagcaagagaaggcggatacccaggacgagtggacaccaggcacagctgtcctgacttctcccgtattggtgcctggctgccctagcaaggcagtagacccaggcctgccttctgtgaagcaagagccacctgacccagaggaggacaaggaggagaacaaggatgattctgcctccaaattggccccagaggaagaggcaggaggggctggcacacccgtgatcacggagattttcagcctgggtggaacccgcttccgagatacagcagtctggttgccaaggtccaaagaccttaaaaaacctggagctagaaagcagtagactggaggcttctacagactgtaggattcaagtctgcagggcaggcactcgggaagggaagatggatgtaaagtgtgggagaccgaggacacagtggagcccacgagcacgagctggaacccacgaggatggcctggaacccatgtcagtctctcaccacctccagcttcgatgatgtgggtgtcctgcagaagaagctggtgcccttcctcacagagttaaatatgcatctggcccaggaattagagaagctgaaaggatgatcctggggaaggtggagcagctgcaggcctggctgcaggcctgactactgcccacaccaacgaggtgatctagcagatacatggcaacgtgtgaactgcaacaacgcctggtgccccagcaccaaccttccaagtgtaaaaacaatgtgctgctgcttcacttccgccctccggttatcaagcaaaatgtctcttgtggcccatcttactggaagagagttccgggaaacatagcctcaccaaggtgacacattacaaagccaccctaccatgaatccgctcccaagggtctcactgctcacctgaggataactcaatataactatgtggctgaaaatgcaaagctgaagaccatggatttcatggtgattccagcaagtacagagattctatgaagcccacccagaaaaaacttgctggtcctggctatttttgtgtcatttattcaagtattgagaacctggcctgtggtaggcactgtacttaatactaggatacagaaatgcaaaagatacggcccatgcaattttattaaatgcatcaatatgtattacaaatggtgaatggatttccaactttatcatggaatttaatgctgaatatatagaattcagaaaattgttgggaggacagcccttttgtgaaccttgtttggggcacagtaggaattggaaataatttagtttctatctctaagctgttctattttaaaattatttttaaatttttattgtcccacttactt

SEQ ID NO: 8515 - protein, 549 aa, Homo sapiens; identical to SEQ ID NO: 8505

SEQ ID NO: 8516 - DNA, 3139 bp, Homo sapiens
ccgctgcggagcgccggcccgtaggcgcgggagcctccctattaagggcacgcgacatcgaggcaatagtgcgcaggtgcttagccagaggcggagcccgagaggcaggcagcggacttccggttccgggagcaacgaacagccgcggaggcgacagctaccgcttcagaggaggcggccgcggaggaggaggaaggggaggagggcgaggcgggaggtgcaggagggaccctcgccatgggtccacgggcctagagtggcggaagataccggcctggtgccaaactggctactgctgcttcctgtggcctccatggctgaggactggctggactgcccggccctgggccctggctggaagcgccgcgaagtctttcgcaagtcaggggccacctgtggacgctcagacacctattaccagagccccacaggagacaggatccgaagcaaagttgagctgactcgatacctgggccctgcgtgtgatctcaccctcttcgacttcaaacaaggcatcttgtgctatccagcccccaaggcccatcccgtggcggttgccagcaagaagcgaaagaagccttcaaggccagccaagactcggaaacgtcaggttggaccccagagtggtgaggtcaggaaggaggccccgagggatgagaccaaggctgacactgacacagccccagcttcattccctgctcctgggtgctgtgagaactgtggaatcagcttctcaggggatggcacccaaaggcagcggctcaaaacgttgtgcaaagactgtcgagcacagagaattgccttcaaccgggaacagagaatgtttaagcgtgtgggctgtggggagtgtgcagcctgccaggtaacagaagactgtggggcctgctccacctgcctcctgcagctgccccatgatgtggcatcggggctgttctgcaagtgtgaacggagacgctgcctccggattgtggaaaggagccgagggtgtggagtatgccggggctgtcagacccaagaggattgtggccattgccccatctgccttcgccctccccgccctggtctcaggcgccagtggaaatgtgtccagcgacgttgcctacggggtaaacatgcccgccgcaagggaggctgtgactccaagatggctgccaggcggcgccccggagcccagccactgcctccaccacccccatcacagtccccagagcccacagagccgcaccccagagccctggccccctcgccacctgccgagttcatctattactgtgtagacgaggacgagctacagccctacacgaaccgccggcagaaccgcaagtgcggggcctgtgcagcctgcctacggcggatggactgtggccgctgcgacttctgctgcgacaagcccaaattcgggggcagcaaccagaagcgccagaagtgtcgttggcgccaatgcctgcagtttgccatgaagcggctgctgcccagtgtctggtcagagtctgaggatggggcaggatcgcccccaccttaccgtcgtcgaaagaggcccagctctgcccgacggcaccatcttggccctaccttgaagcccaccttggctacacgcacagcccaaccagaccatacccaggctccaacgaagcaggaagcaggtggtggctttgtgctgcccccgcctggcactgaccttgtgtttttacgggaaggcgcaagcagtcctgtgcaggtgccgggccctgttgcagcttccacagaagccctgttgcaggaggcccagtgctctggcctgagttgggttgtggccttaccccaggtgaagcaagagaaggcggatacccaggacgagtggacaccaggcacagctgtcctgacttctcccgtattggtgcctggctgccctagcaaggcagtagacccaggcctgccttctgtgaagcaagagccacctgacccagaggaggacaaggaggagaacaaggatgattctgcctccaaattggccccagaggaagaggcaggaggggctggcacacccgtgatcacggagattttcagcctgggtggaacccgcttccgagatacagcagtctggttgccaaggtccaaagaccttaaaaaacctggagctagaaagcagtagactggaggcttctacagactgtaggattcaagtctgcagggcaggcactcgggaagggaagatggatgtaaagtgtgggagaccgaggacacagtggagcccacgagcacgagctggaacccacgaggatggcctggaacccatgtcagtctctcaccacctccagcttcgatgatgtgggtgtcctgcagaagaagctggtgcccttcctcacagagttaaatatgcatctggcccaggaattagagaagctgaaaggatgatcctggggaaggtggagcagctgcaggcctggctgcaggcctgactactgcccacaccaacgaggtgatctagcagatacatggcaacgtgtgaactgcaacaacgcctggtgccccagcaccaaccttccaagtgtaaaaacaatgtgctgctgcttcacttccgccctccggttatcaagcaaaatgtctcttgtggcccatcttactggaagagagttccgggaaacatagcctcaccaaggtgacacattacaaagccaccctaccatgaatccgctcccaagggtctcactgctcacctgaggataactcaatataactatgtggctgaaaatgcaaagctgaagaccatggatttcatggtgattccagcaagtacagagattctatgaagcccacccagaaaaaacttgctggtcctggctatttttgtgtcatttattcaagtattgagaacctggcctgtggtaggcactgtacttaatactaggatacagaaatgcaaaagatacggcccatgcaattttattaaatgcatcaatatgtattacaaatggtgaatggatttccaactttatcatggaatttaatgctgaatatatagaattcagaaaattgttgggaggacagcccttttgtgaaccttgtttggggcacagtaggaattggaaataatttagtttctatctctaagctgttctattttaaaattatttttaaatttttattgtcccacttactt

SEQ ID NO: 8517 - protein, 605 aa, Homo sapiens; identical to SEQ ID NO: 1198

SEQ ID NO: 8518 - DNA, 2833 bp, Homo sapiens
ccgctgcggagcgccggcccgtaggcgcgggagcctccctattaagggcacgcgacatcgaggcaatagtgcgcaggtgcttagccagaggcggagcccgagaggcaggcagcggacttccggttccgggagcaacgaacagccgcggaggcgacagctaccgcttcagaggaggcggccgcggaggaggaggaaggggaggagggcgaggcgggaggtgcaggagggaccctcgccatgggtccacgggcctagagtggcggaagataccggcctggtgccaaactggctactgctgcttcctgtggcctccatggctgaggactggctggactgcccggccctgggccctggctggaagcgccgcgaagtctttcgcaagtcaggggccacctgtggacgctcagacacctattaccagagccccacaggagacaggatccgaagcaaagttgagctgactcgatacctgggccctgcgtgtgatctcaccctcttcgacttcaaacaaggcatcttgtgctatccagcccccaaggcccatcccgtggcggttgccagcaagaagcgaaagaagccttcaaggccagccaagactcggaaacgtcaggttggaccccagagtggtgaggtcaggaaggaggccccgagggatgagaccaaggctgacactgacacagccccagcttcattccctgctcctgggtgctgtgagaactgtggaatcagcttctcaggggatggcacccaaaggcagcggctcaaaacgttgtgcaaagactgtcgagcacagagaattgccttcaaccgggaacagagaatgtttaagcgtgtgggctgtggggagtgtgcagcctgccaggtaacagaagactgtggggcctgctccacctgcctcctgcagctgccccatgatgtggcatcggggctgttctgcaagtgtgaacggagacgctgcctccggattgtggaaaggagccgagggtgtggagtatgccggggctgtcagacccaagaggattgtggccattgccccatctgccttcgccctccccgccctggtctcaggcgccagtggaaatgtgtccagcgacgttgcctacggggtaaacatgcccgccgcaagggaggctgtgactccaagatggctgccaggcggcgccccggagcccagccactgcctccaccacccccatcacagtccccagagcccacagagccgcaccccagagccctggccccctcgccacctgccgagttcatctattactgtgtagacgaggacgagctaaagcggctgctgcccagtgtctggtcagagtctgaggatggggcaggatcgcccccaccttaccgtcgtcgaaagaggcccagctctgcccgacggcaccatcttggccctaccttgaagcccaccttggctacacgcacagcccaaccagaccatacccaggctccaacgaagcaggaagcaggtggtggctttgtgctgcccccgcctggcactgaccttgtgtttttacgggaaggcgcaagcagtcctgtgcaggtgccgggccctgttgcagcttccacagaagccctgttgcaggcagtagacccaggcctgccttctgtgaagcaagagccacctgacccagaggaggacaaggaggagaacaaggatgattctgcctccaaattggccccagaggaagaggcaggaggggctggcacacccgtgatcacggagattttcagcctgggtggaacccgcttccgagatacagcagtctggttgccaaggtccaaagaccttaaaaaacctggagctagaaagcagtagactggaggcttctacagactgtaggattcaagtctgcagggcaggcactcgggaagggaagatggatgtaaagtgtgggagaccgaggacacagtggagcccacgagcacgagctggaacccacgaggatggcctggaacccatgtcagtctctcaccacctccagcttcgatgatgtgggtgtcctgcagaagaagctggtgcccttcctcacagagttaaatatgcatctggcccaggaattagagaagctgaaaggatgatcctggggaaggtggagcagctgcaggcctggctgcaggcctgactactgcccacaccaacgaggtgatctagcagatacatggcaacgtgtgaactgcaacaacgcctggtgccccagcaccaaccttccaagtgtaaaaacaatgtgctgctgcttcacttccgccctccggttatcaagcaaaatgtctcttgtggcccatcttactggaagagagttccgggaaacatagcctcaccaaggtgacacattacaaagccaccctaccatgaatccgctcccaagggtctcactgctcacctgaggataactcaatataactatgtggctgaaaatgcaaagctgaagaccatggatttcatggtgattccagcaagtacagagattctatgaagcccacccagaaaaaacttgctggtcctggctatttttgtgtcatttattcaagtattgagaacctggcctgtggtaggcactgtacttaatactaggatacagaaatgcaaaagatacggcccatgcaattttattaaatgcatcaatatgtattacaaatggtgaatggatttccaactttatcatggaatttaatgctgaatatatagaattcagaaaattgttgggaggacagcccttttgtgaaccttgtttggggcacagtaggaattggaaataatttagtttctatctctaagctgttctattttaaaattatttttaaatttttattgtcccacttactt

SEQ ID NO: 8519 - protein, 503 aa, Homo sapiens; identical to SEQ ID NO: 1192

SEQ ID NO: 8520 - DNA, 3134 bp, Homo sapiens
ccgctgcggagcgccggcccgtaggcgcgggagcctccctattaagggcacgcgacatcgaggcaatagtgcgcaggtgcttagccagaggcggagcccgagaggcaggcagcggacttccggttccgggagcaacgaacagccgcggaggcgacagctaccgcttcagaggaggcggccgcggaggaggaggaaggggaggagggcgaggcgggaggtgcaggagggaccctcgccatgggtccacgggcctagagtggcggaagataccggcctggtgccaaactggctactgctgcttcctgtggcctccatggctgaggactggctggactgcccggccctgggccctggctggaagcgccgcgaagtctttcgcaagtcaggggccacctgtggacgctcagacacctattaccagagccccacaggagacaggatccgaagcaaagttgagctgactcgatacctgggccctgcgtgtgatctcaccctcttcgacttcaaacaaggcatcttgtgctatccagcccccaaggcccatcccgtggcggttgccagcaagaagcgaaagaagccttcaaggccagccaagactcggaaacgtcaggttggaccccagagtggtgaggtcaggaaggaggccccgagggatgagaccaaggctgacactgacacagccccagcttcattccctgctcctgggtgctgtgagaactgtggaatcagcttctcaggggatggcacccaaaggcagcggctcaaaacgttgtgcaaagactgtcgagcacagagaattgccttcaaccgggaacagagaatgtttaagcgtgtgggctgtggggagtgtgcagcctgccaggtaacagaagactgtggggcctgctccacctgcctcctgcagctgccccatgatgtggcatcggggctgttctgcaagtgtgaacggagacgctgcctccggattgtggaaaggagccgagggtgtggagtatgccggggctgtcagacccaagaggattgtggccattgccccatctgccttcgccctccccgccctggtctcaggcgccagtggaaatgtgtccagcgacgttgcctacggggtaaacatgcccgccgcaagggaggctgtgactccaagatggctgccaggcggcgccccggagcccagccactgcctccaccacccccatcacagtccccagagcccacagagccgcaccccagagccctggccccctcgccacctgccgagttcatctattactgtgtagacgaggacgagctacagccctacacgaaccgccggcagaaccgcaagtgcggggcctgtgcagcctgcctacggcggatggactgtggccgctgcgacttctgctgcgacaagcccaaattcgggggcagcaaccagaagcgccagaagtgtcgttggcgccaatgcctgcagtttgccatgaagcggctgctgcccagtgtctggtcagagtctgaggatggggcaggatcgcccccaccttaccgtcgtcgaaagaggcccagctctgcccgacggcaccatcttggccctaccttgaagcccaccttggctacacgcacagcccaaccagaccatacccaggctccaacgaagcaggaagcaggtggtggctttgtgctgcccccgcctggcactgaccttgtgtttttacgggaaggcgcaagcagtcctgtgcaggtgccgggccctgttgcagcttccacagaagccctgttgcaggcagtagacccaggcctgccttctgtgaagcaagagccacctgacccagaggaggacaaggaggagaacaaggatgattctgcctccaaattggccccagaggaagaggcaggaggggctggcacacccgtggaaccaaccacccaaccccagtattctggtaattttgacaatgatctatatgaaatttatttgattgacatttagactcatgagttaagcttctgctgaccatttatgttagggtacaatcagaggagcagaaccactaagataaagattatgtatatatgtattttaagggatttattatagggatctgaccgcatgccattgtgggagctggttaaacagtctctgtaaggctgttgtctttgcatctaatgctggagcttgaagtctgcagggcaggcactcgggaagggaagatggatgtaaagtgtgggagaccgaggacacagtggagcccacgagcacgagctggaacccacgaggatggcctggaacccatgtcagtctctcaccacctccagcttcgatgatgtgggtgtcctgcagaagaagctggtgcccttcctcacagagttaaatatgcatctggcccaggaattagagaagctgaaaggatgatcctggggaaggtggagcagctgcaggcctggctgcaggcctgactactgcccacaccaacgaggtgatctagcagatacatggcaacgtgtgaactgcaacaacgcctggtgccccagcaccaaccttccaagtgtaaaaacaatgtgctgctgcttcacttccgccctccggttatcaagcaaaatgtctcttgtggcccatcttactggaagagagttccgggaaacatagcctcaccaaggtgacacattacaaagccaccctaccatgaatccgctcccaagggtctcactgctcacctgaggataactcaatataactatgtggctgaaaatgcaaagctgaagaccatggatttcatggtgattccagcaagtacagagattctatgaagcccacccagaaaaaacttgctggtcctggctatttttgtgtcatttattcaagtattgagaacctggcctgtggtaggcactgtacttaatactaggatacagaaatgcaaaagatacggcccatgcaattttattaaatgcatcaatatgtattacaaatggtgaatggatttccaactttatcatggaatttaatgctgaatatatagaattcagaaaattgttgggaggacagcccttttgtgaaccttgtttggggcacagtaggaattggaaataatttagtttctatctctaagctgttctattttaaaattatttttaaatttttattgtcccacttactt

SEQ ID NO: 8521 - protein, 550 aa, Homo sapiens; identical to SEQ ID NO: 8499

SEQ ID NO: 8522 - DNA, 2677 bp, Homo sapiens
ccgctgcggagcgccggcccgtaggcgcgggagcctccctattaagggcacgcgacatcgaggcaatagtgcgcaggtgcttagccagaggcggagcccgagaggcaggcagcggacttccggttccgggagcaacgaacagccgcggaggcgacagctaccgcttcagaggaggcggccgcggaggaggaggaaggggaggagggcgaggcgggaggtgcaggagggaccctcgccatgggtccacgggcctagagtggcggaagataccggcctggtgccaaactggctactgctgcttcctgtggcctccatggctgaggactggctggactgcccggccctgggccctggctggaagcgccgcgaagtctttcgcaagtcaggggccacctgtggacgctcagacacctattaccagagccccacaggagacaggatccgaagcaaagttgagctgactcgatacctgggccctgcgtgtgatctcaccctcttcgacttcaaacaaggcatcttgtgctatccagcccccaaggcccatcccgtggcggttgccagcaagaagcgaaagaagccttcaaggccagccaagactcggaaacgtcaggttggaccccagagtggtgaggtcaggaaggaggccccgagggatgagaccaaggctgacactgacacagccccagcttcattccctgctcctgggtgctgtgagaactgtggaatcagcttctcaggggatggcacccaaaggcagcggctcaaaacgttgtgcaaagactgtcgagcacagagaattgccttcaaccgggaacagagaatgtttaagcgtgtgggctgtggggagtgtgcagcctgccaggtaacagaagactgtggggcctgctccacctgcctcctgcagctgccccatgatgtggcatcggggctgttctgcaagtgtgaacggagacgctgcctccggattgtggaaaggagccgagggtgtggagtatgccggggctgtcagacccaagaggattgtggccattgccccatctgccttcgccctccccgccctggtctcaggcgccagtggaaatgtgtccagcgacgttgcctacggggtaaacatgcccgccgcaagggaggctgtgactccaagatggctgccaggcggcgccccggagcccagccactgcctccaccacccccatcacagtccccagagcccacagagccgcagccctacacgaaccgccggcagaaccgcaagtgcggggcctgtgcagcctgcctacggcggatggactgtggccgctgcgacttctgctgcgacaagcccaaattcgggggcagcaaccagaagcgccagaagtgtcgttggcgccaatgcctgcagtttgccatgaagcggctgctgcccagtgtctggtcagagtctgaggatggggcaggatcgcccccaccttaccgtcgtcgaaagaggcccagctctgcccgacggcaccatcttggccctaccttgaagcccaccttggctacacgcacagcccaaccagaccatacccaggctccaacgaagcaggaagcaggtggtggctttgtgctgcccccgcctggcactgaccttgtgtttttacgggaaggcgcaagcagtcctgtgcaggtgccgggccctgttgcagcttccacagaagccctgttgcaggcagtagacccaggcctgccttctgtgaagcaagagccacctgacccagaggaggacaaggaggagaacaaggatgattctgcctccaaattggccccagaggaagaggcaggaggggctggcacacccgtgatcacggagattttcagcctgggtggaacccgcttccgagatacagcagtctggttgccaagtctgcagggcaggcactcgggaagggaagatggatgtaaagtgtgggagaccgaggacacagtggagcccacgagcacgagctggaacccacgaggatggcctggaacccatgtcagtctctcaccacctccagcttcgatgatgtgggtgtcctgcagaagaagctggtgcccttcctcacagagttaaatatgcatctggcccaggaattagagaagctgaaaggatgatcctggggaaggtggagcagctgcaggcctggctgcaggcctgactactgcccacaccaacgaggtgatctagcagatacatggcaacgtgtgaactgcaacaacgcctggtgccccagcaccaaccttccaagtgtaaaaacaatgtgctgctgcttcacttccgccctccggttatcaagcaaaatgtctcttgtggcccatcttactggaagagagttccgggaaacatagcctcaccaaggtgacacattacaaagccaccctaccatgaatccgctcccaagggtctcactgctcacctgaggataactcaatataactatgtggctgaaaatgcaaagctgaagaccatggatttcatggtgattccagcaagtacagagattctatgaagcccacccagaaaaaacttgctggtcctggctatttttgtgtcatttattcaagtattgagaacctggcctgtggtaggcactgtacttaatactaggatacagaaatgcaaaagatacggcccatgcaattttattaaatgcatcaatatgtattacaaatggtg

SEQ ID NO: 8523 - protein, 586 aa, Homo sapiens; identical to SEQ ID NO: 1196

SEQ ID NO: 8524 - DNA, 2788 bp, Homo sapiens
ccgctgcggagcgccggcccgtaggcgcgggagcctccctattaagggcacgcgacatcgaggcaatagtgcgcaggtgcttagccagaggcggagcccgagaggcaggcagcggacttccggttccgggagcaacgaacagccgcggaggcgacagctaccgcttcagaggaggcggccgcggaggaggaggaaggggaggagggcgaggcgggaggtgcaggagggaccctcgccatgggtccacgggcctagagtggcggaagataccggcctggtgccaaactggctactgctgcttcctgtggcctccatggctgaggactggctggactgcccggccctgggccctggctggaagcgccgcgaagtctttcgcaagtcaggggccacctgtggacgctcagacacctattaccagagccccacaggagacaggatccgaagcaaagttgagctgactcgatacctgggccctgcgtgtgatctcaccctcttcgacttcaaacaaggcatcttgtgctatccagcccccaaggcccatcccgtggcggttgccagcaagaagcgaaagaagccttcaaggccagccaagactcggaaacgtcaggttggaccccagagtggtgaggtcaggaaggaggccccgagggatgagaccaaggctgacactgacacagccccagcttcattccctgctcctgggtgctgtgagaactgtggaatcagcttctcaggggatggcacccaaaggcagcggctcaaaacgttgtgcaaagactgtcgagcacagagaattgccttcaaccgggaacagagaatgtttaagcgtgtgggctgtggggagtgtgcagcctgccaggtaacagaagactgtggggcctgctccacctgcctcctgcagctgccccatgatgtggcatcggggctgttctgcaagtgtgaacggagacgctgcctccggattgtggaaaggagccgagggtgtggagtatgccggggctgtcagacccaagaggattgtggccattgccccatctgccttcgccctccccgccctggtctcaggcgccagtggaaatgtgtccagcgacgttgcctacggggtaaacatgcccgccgcaagggaggctgtgactccaagatggctgccaggcggcgccccggagcccagccactgcctccaccacccccatcacagtccccagagcccacagagccgcaccccagagccctggccccctcgccacctgccgagttcatctattactgtgtagacgaggacgagctaaagcggctgctgcccagtgtctggtcagagtctgaggatggggcaggatcgcccccaccttaccgtcgtcgaaagaggcccagctctgcccgacggcaccatcttggccctaccttgaagcccaccttggctacacgcacagcccaaccagaccatacccaggctccaacgaagcaggaagcaggtggtggctttgtgctgcccccgcctggcactgaccttgtgtttttacgggaaggcgcaagcagtcctgtgcaggtgccgggccctgttgcagcttccacagaagccctgttgcaggaggcccagtgctctggcctgagttgggttgtggccttaccccaggtgaagcaagagaaggcggatacccaggacgagtggacaccaggcacagctgtcctgacttctcccgtattggtgcctggctgccctagcaaggcagtagacccaggcctgccttctgtgaagcaagagccacctgacccagaggaggacaaggaggagaacaaggatgattctgcctccaaattggccccagaggaagaggcaggaggggctggcacacccgtgatcacggagattttcagcctgggtggaacccgcttccgagatacagcagtctggttgccaaggtccaaagaccttaaaaaacctggagctagaaagcagtagactggaggcttctacagactgtaggattcaagtctgcagggcaggcactcgggaagggaagatggatgtaaagtgtgggagaccgaggacacagtggagcccacgagcacgagctggaacccacgaggatggcctggaacccatgtcagtctctcaccacctccagcttcgatgatgtgggtgtcctgcagaagaagctggtgcccttcctcacagagttaaatatgcatctggcccaggaattagagaagctgaaaggatgatcctggggaaggtggagcagctgcaggcctggctgcaggcctgactactgcccacaccaacgaggtgatctagcagatacatggcaacgtgtgaactgcaacaacgcctggtgccccagcaccaaccttccaagtgtaaaaacaatgtgctgctgcttcacttccgccctccggttatcaagcaaaatgtctcttgtggcccatcttactggaagagagttccgggaaacatagcctcaccaaggtgacacattacaaagccaccctaccatgaatccgctcccaagggtctcactgctcacctgaggataactcaatataactatgtggctgaaaatgcaaagctgaagaccatggatttcatggtgattccagcaagtacagagattctatgaagcccacccagaaaaaacttgctggtcctggctatttttgtgtcatttattcaagtattgagaacctggcctgtggtaggcactgtacttaatactaggatacagaaatgcaaaagatacggcccatgcaattttattaaatgcatcaatatgtattacaaatggtg

SEQ ID NO: 8525 - protein, 549 aa, Homo sapiens; identical to SEQ ID NO: 8505

SEQ ID NO: 8526 - DNA, 385 bp, Homo sapiens
cggccgcggaggaggaggaaggggaggagggcgaggcgggaggtgcaggagggaccctcgccatgggtccacgggcctagagtggcggaagataccggcctggtgccaaactggctactgctgcttcctgtggcctccatggctgaggactggctggactgcccggccctgggccctggctggaagcgccgcgaagtctttcgcaagtcaggggccacctgtggacgctcagacacctattaccagaggtactgggtgggtagtgggcagagtcaggagtggggtagagcctgattctggtaaaatcaaatggtgtggttaaatttatggatgaagtttaaattatgcacatacagttaatccttattagcggattttatgtttg

SEQ ID NO: 8527 - protein, 51 aa, Homo sapiens
MAEDWLDCPALGPGWKRREVFRKSGATCGRSDTYYQRYWVGSGQSQEWGRA

SEQ ID NO: 8528 - DNA, 238 bp, Homo sapiens
ctgacaggtaggagtgtcgggatcctgggacgaggacggagaggaatggtggagatcagaacgctaaagggagacatcggggcatctgaagttgagagagaaatgggggttcagaactctgagagggagaaatgaggggccctcaggaagaacagagagaatggaggagggttcggaatgctgaggggagaaattagggtctctctggatgataagggaggaatggaggatgagaaca

SEQ ID NO: 8529 - DNA, 712 bp, Homo sapiens
caaccagccaggacagatggacctcccttccctccctctactgccctctctactccaaatccccagggccacacgactcttctgtgatgtgtataatcctcagagcaaaacatactgtaagcggctccaggtgctgtgccccgagcactcacgggaccccaaagtgccagctgacgaggtatgcgggtgcccccttgtacgtgatgtctttgagctcacgggtgacttctgccgcctgcccaagcgccagtgcaatcgccattactgctgggagaagctgcggcgtgcggaagtggacttggagcgcgtgcgtgtgtggtacaagctggacgagctgtttgagcaggagcgcaatgtgcgcacagccatgacaaaccgcgcgggattgctggccctgatgctgcaccagacgatccagcacgatcccctcactaccgacctgcgctccagtgccgaccgctgagcctcctggcccggaccccttacaccctgcattccagatgggggagccgcccggtgcccgtgtgtccgttcctccactcatctgtttctccggttctccctgtgcccatccaccggttgaccgcccatctgcctttatcagagggactgtccccgtcgacatgttcagtgcctggtggggctgcggagtccactcatccttgcctcctctccctgggttttgttaataaaattttgaagaaaccaagga

SEQ ID NO: 8530 - protein, 148 aa, Homo sapiens
MDLPSLPLLPSLLQIPRATRLFCDVYNPQSKTYCKRLQVLCPEHSRDPKVPADEVCGCPLVRDVFELTGDFCRLPKRQCNRHYCWEKLRRAEVDLERVRVWYKLDELFEQERNVRTAMTNRAGLLALMLHQTIQHDPLTTDLRSSADR

SEQ ID NO: 8531 - DNA, 991 bp, Homo sapiens
ggagctggggcaggatacgggcaaccagccaggacagatggacctcccttccctccctctactgccctctctactccaaatccccagggccacacgactcttctgtgatgtgtataatcctcagagcaaaacatactgtaagcggctccaggtgctgtgccccgagcactcacgggaccccaaagtaaggttttccctcagctcctcccattttgcccctcctccctgcctcgctgtcccacattcatcccttccttcctcacctcacttttccttcactttttcctctcagcttccctgctgcttcaccctccattcctccttttccatgcctcctcaccgttccctgaaccctccattcttttccttctccctccttgagcccccattcctattctcccttatcaccgctattcatccccccaacctggcctccttgcaggtgccagctgacgaggtatgcgggtgcccccttgtacgtgatgtctttgagctcacgggtgacttctgccgcctgcccaagcgccagtgcaatcgccattactgctgggagaagctgcggcgtgcggaagtggacttggagcgcgtgcgtgtgtggtacaagctggacgagctgtttgagcaggagcgcaatgtgcgcacagccatgacaaaccgcgcgggattgctggccctgatgctgcaccagacgatccagcacgatcccctcactaccgacctgcgctccagtgccgaccgctgagcctcctggcccggaccccttacaccctgcattccagatgggggagccgcccggtgcccgtgtgtccgttcctccactcatctgtttctccggttctccctgtgcccatccaccggttgaccgcccatctgcctttatcagagggactgtccccgtcgacatgttcagtgcctggtggggctgcggagtccactcatccttgcctcctctccctgggttttgttaataaaattttgaagaaaccaagga

SEQ ID NO: 8532 - protein, 234 aa, Homo sapiens
MDLPSLPLLPSLLQIPRATRLFCDVYNPQSKTYCKRLQVLCPEHSRDPKVRFSLSSSHFAPPPCLAVPHSSLPSSPHFSFTFSSQLPCCFTLHSSFSMPPHRSLNPPFFSFSLLEPPFLFSLITAIHPPNLASLQVPADEVCGCPLVRDVFELTGDFCRLPKRQCNRHYCWEKLRRAEVDLERVRVWYKLDELFEQERNVRTAMTNRAGLLALMLHQTIQHDPLTTDLRSSADR

SEQ ID NO: 8533 - DNA, 2898 bp, Homo sapiens
tgaagtcggagacgacagaggaactggtttcctccgccccgcaaggcacacagcctgccgacgccccattaatacatgtggaaggggaaagagactgaatggaggaatgaatacaacttgatccaggtcgtgcttcggaagcggtcactttacctgtgaacctctctgcctgacaaacgggcaatgtacggaatcaaccaccaagatggcggcgcccgtgaagaatccgcaattaggtcgccgtcatatgtcgcctaggaacgtacggaattcgacccacgtacggaatcggattccaagatgacggcatctatgaggaagtcacgcagtaggtgcagccatgttgcctgtacgtcgaggccgtacaagcagccgccgtacggactctactgacaaggtggcggcgccctcgggaaagccacattagagcgcggccatgttcccggcgaacatatggattcggccaccatacggatacgataagcaagatggcggcgcctgaggggtcttgggggctctaggccggccacctactggtttgcagcggagacgacgcatggggcctgcgcaataggagtacgctgcctgggaggcgtgactagaagcggaagtagttgtgggcgcctttgcaaccgcctgggacgccgccgagtggtctgtgcaggttcgcgggtcgctggcgggggtcgtgagggagtgcgccgggagcggagatatggagggagatggttcagacccagagcctccagatgccggggaggacagcaagtccgagaatggggagaatgcgcccatctactgcatctgccgcaaaccggacatcaactgcttcatgatcgggtgtgacaactgcaatgagtggttccatggggactgcatccggatcactgagaagatggccaaggccatccgggagtggtactgtcgggagtgcagagagaaagaccccaagctagagattcgctatcggcacaagaagtcacgggagcgggatggcaatgagcgggacagcagtgagccccgggatgagggtggagggcgcaagaggcctgtccctgatccagacctgcagcgccgggcagggtcagggacaggggttggggccatgcttgctcggggctctgcttcgccccacaaatcctctccgcagcccttggtggccacacccagccagcatcaccagcagcagcagcagcagatcaaacggtcagcccgcatgtgtggtgagtgtgaggcatgtcggcgcactgaggactgtggtcactgtgatttctgtcgggacatgaagaagttcgggggccccaacaagatccggcagaagtgccggctgcgccagtgccagctgcgggcccgggaatcgtacaagtacttcccttcctcgctctcaccagtgacgccctcagagtccctgccaaggccccgccggccactgcccacccaacagcagccacagccatcacagaagttagggcgcatccgtgaagatgagggggcagtggcgtcatcaacagtcaaggagcctcctgaggctacagccacacctgagccactctcagatgaggacctacctctggatcctgacctgtatcaggacttctgtgcaggggcctttgatgaccatggcctgccctggatgagcgacacagaagagtccccattcctggaccccgcgctgcggaagagggcagtgaaagtgaagcatgtgaagcgtcgggagaagaagtctgagaagaagaaggaggagcgatacaagcggcatcggcagaagcagaagcacaaggataaatggaaacacccagagagggctgatgccaaggaccctgcgtcactgccccagtgcctggggcccggctgtgtgcgccccgcccagcccagctccaagtattgctcagatgactgtggcatgaagctggcagccaaccgcatctacgagatcctcccccagcgcatccagcagtggcagcagagcccttgcattgctgaagagcacggcaagaagctgctcgaacgcattcgccgagagcagcagagtgcccgcactcgccttcaggaaatggaacgccgattccatgagcttgaggccatcattctacgtgccaagcagcaggctgtgcgcgaggatgaggagagcaacgagggtgacagtgatgacacagacctgcagatcttctgtgtttcctgtgggcaccccatcaacccacgtgttgccttgcgccacatggagcgctgctacgccaagtatgagagccagacgtcctttgggtccatgtaccccacacgcattgaaggagcaaaacatactgtaagcggctccaggtgctgtgccccgagcactcacgggaccccaaagtgccagctgacgaggtatgcgggtgcccccttgtacgtgatgtctttgagctcacgggtgacttctgccgcctgcccaagcgccagtgcaatcgccattactgctgggagaagctgcggcgtgcggaagtggacttggagcgcgtgcgtgtgtggtacaagctggacgagctgtttgagcaggagcgcaatgtgcgcacagccatgacaaaccgcgcgggattgctggccctgatgctgcaccagacgatccagcacgatcccctcactaccgacctgcgctccagtgccgaccgctgagcctcctggcccggaccccttacaccctgcattccagatgggggagccgcccggtgcccgtgtgtccgttcctccactcatctgtttctccggttctccctgtgcccatccaccggttgaccgcccatctgcctttatcagagggactgtccccgtcgacatgttcagtgcctggtggggctgcggagtccactcatccttgcctcctctccctgggttttgttaataaaattttgaagaaaccaagga

SEQ ID NO: 8534 - protein, 613 aa, Homo sapiens
MEGDGSDPEPPDAGEDSKSENGENAPIYCICRKPDINCFMIGCDNCNEWFHGDCIRITEKMAKAIREWYCRECREKDPKLEIRYRHKKSRERDGNERDSSEPRDEGGGRKRPVPDPDLQRRAGSGTGVGAMLARGSASPHKSSPQPLVATPSQHHQQQQQQIKRSARMCGECEACRRTEDCGHCDFCRDMKKFGGPNKIRQKCRLRQCQLRARESYKYFPSSLSPVTPSESLPRPRRPLPTQQQPQPSQKLGRIREDEGAVASSTVKEPPEATATPEPLSDEDLPLDPDLYQDFCAGAFDDHGLPWMSDTEESPFLDPALRKRAVKVKHVKRREKKSEKKKEERYKRHRQKQKHKDKWKHPERADAKDPASLPQCLGPGCVRPAQPSSKYCSDDCGMKLAANRIYEILPQRIQQWQQSPCIAEEHGKKLLERIRREQQSARTRLQEMERRFHELEAIILRAKQQAVREDEESNEGDSDDTDLQIFCVSCGHPINPRVALRHMERCYAKYESQTSFGSMYPTRIEGAKHTVSGSRCCAPSTHGTPKCQLTRYAGAPLYVMSLSSRVTSAACPSASAIAITAGRSCGVRKWTWSACVCGTSWTSCLSRSAMCAQP

SEQ ID NO: 8535 - DNA, 2953 bp, Homo sapiens
ggaaagagtggtggcaggtgaagtcggagacgacagaggaactggtttcctccgccccgcaaggcacacagcctgccgacgccccattaatacatgtggaaggggaaagagactgaatggaggaatgaatacaacttgatccaggtcgtgcttcggaagcggtcactttacctgtgaacctctctgcctgacaaacgggcaatgtacggaatcaaccaccaagatggcggcgcccgtgaagaatccgcaattaggtcgccgtcatatgtcgcctaggaacgtacggaattcgacccacgtacggaatcggattccaagatgacggcatctatgaggaagtcacgcagtaggtgcagccatgttgcctgtacgtcgaggccgtacaagcagccgccgtacggactctactgacaaggtggcggcgccctcgggaaagccacattagagcgcggccatgttcccggcgaacatatggattcggccaccatacggatacgataagcaagatggcggcgcctgaggggtcttgggggctctaggccggccacctactggtttgcagcggagacgacgcatggggcctgcgcaataggagtacgctgcctgggaggcgtgactagaagcggaagtagttgtgggcgcctttgcaaccgcctgggacgccgccgagtggtctgtgcaggttcgcgggtcgctggcgggggtcgtgagggagtgcgccgggagcggagatatggagggagatggttcagacccagagcctccagatgccggggaggacagcaagtccgagaatggggagaatgcgcccatctactgcatctgccgcaaaccggacatcaactgcttcatgatcgggtgtgacaactgcaatgagtggttccatggggactgcatccggatcactgagaagatggccaaggccatccgggagtggtactgtcgggagtgcagagagaaagaccccaagctagagattcgctatcggcacaagaagtcacgggagcgggatggcaatgagcgggacagcagtgagccccgggatgagggtggagggcgcaagaggcctgtccctgatccagacctgcagcgccgggcagggtcagggacaggggttggggccatgcttgctcggggctctgcttcgccccacaaatcctctccgcagcccttggtggccacacccagccagcatcaccagcagcagcagcagcagatcaaacggtcagcccgcatgtgtggtgagtgtgaggcatgtcggcgcactgaggactgtggtcactgtgatttctgtcgggacatgaagaagttcgggggccccaacaagatccggcagaagtgccggctgcgccagtgccagctgcgggcccgggaatcgtacaagtacttcccttcctcgctctcaccagtgacgccctcagagtccctgccaaggccccgccggccactgcccacccaacagcagccacagccatcacagaagttagggcgcatccgtgaagatgagggggcagtggcgtcatcaacagtcaaggagcctcctgaggctacagccacacctgagccactctcagatgaggacctacctctggatcctgacctgtatcaggacttctgtgcaggggcctttgatgaccatggcctgccctggatgagcgacacagaagagtccccattcctggaccccgcgctgcggaagagggcagtgaaagtgaagcatgtgaagcgtcgggagaagaagtctgagaagaagaaggaggagcgatacaagcggcatcggcagaagcagaagcacaaggataaatggaaacacccagagagggctgatgccaaggaccctgcgtcactgccccagtgcctggggcccggctgtgtgcgccccgcccagcccagctccaagtattgctcagatgactgtggcatgaagctggcagccaaccgcatctacgagatcctcccccagcgcatccagcagtggcagcagagcccttgcattgctgaagagcacggcaagaagctgctcgaacgcattcgccgagagcagcagagtgcccgcactcgccttcaggaaatggaacgccgattccatgagcttgaggccatcattctacgtgccaagcagcaggctgtgcgcgaggatgaggagagcaacgagggtgacagtgatgacacagacctgcagatcttctgtgtttcctgtgggcaccccatcaacccacgtgttgccttgcgccacatggagcgctgctacgccaagtatgagagccagacgtcctttgggtccatgtaccccacacgcattgaaggggccacacgactcttctgtgatgtgtataatcctcagagcaaaacatactgtaagcggctccaggtgctgtgccccgagcactcacgggaccccaaagtgccagctgacgaggtatgcgggtgcccccttgtacgtgatgtctttgagctcacgggtgacttctgccgcctgcccaagcgccagtgcaatcgccattactgctgggagaagctgcggcgtgcggaagtggacttggagcgcgtgcgtgtgtggtacaagctggacgagctgtttgagcaggagcgcaatgtgcgcacagccatgacaaaccgcgcgggattgctggccctgatgctgcaccagacgatccagcacgatcccctcactaccgacctgcgctccagtgccgaccgctgagcctcctggcccggaccccttacaccctgcattccagatgggggagccgcccggtgcccgtgtgtccgttcctccactcatctgtttctccggttctccctgtgcccatccaccggttgaccgcccatctgcctttatcagagggactgtccccgtcgacatgttcagtgcctggtggggctgcggagtccactcatccttgcctcctctccctgggttttgttaataaaattttgaagaaaccaagga

SEQ ID NO: 8536 - protein, 656 aa, Homo sapiens
MEGDGSDPEPPDAGEDSKSENGENAPIYCICRKPDINCFMIGCDNCNEWFHGDCIRITEKMAKAIREWYCRECREKDPKLEIRYRHKKSRERDGNERDSSEPRDEGGGRKRPVPDPDLQRRAGSGTGVGAMLARGSASPHKSSPQPLVATPSQHHQQQQQQIKRSARMCGECEACRRTEDCGHCDFCRDMKKFGGPNKIRQKCRLRQCQLRARESYKYFPSSLSPVTPSESLPRPRRPLPTQQQPQPSQKLGRIREDEGAVASSTVKEPPEATATPEPLSDEDLPLDPDLYQDFCAGAFDDHGLPWMSDTEESPFLDPALRKRAVKVKHVKRREKKSEKKKEERYKRHRQKQKHKDKWKHPERADAKDPASLPQCLGPGCVRPAQPSSKYCSDDCGMKLAANRIYEILPQRIQQWQQSPCIAEEHGKKLLERIRREQQSARTRLQEMERRFHELEAIILRAKQQAVREDEESNEGDSDDTDLQIFCVSCGHPINPRVALRHMERCYAKYESQTSFGSMYPTRIEGATRLFCDVYNPQSKTYCKRLQVLCPEHSRDPKVPADEVCGCPLVRDVFELTGDFCRLPKRQCNRHYCWEKLRRAEVDLERVRVWYKLDELFEQERNVRTAMTNRAGLLALMLHQTIQHDPLTTDLRSSADR

SEQ ID NO: 8537 - DNA, 792 bp, Homo sapiens
gtgatgacacagacctgcagatcttctgtgtttcctgtgggcaccccatcaacccacgtgttgccttgcgccacatggagcgctgctacgccaaggttggggtgtcagactgagggggcggaccatgtgggaacatcagtgggccagtgggggacagatttgttgtctgggtggtgtcttgggagggcatgcagcgcacatccacagttccctccatttgtgctcatccctccagtatgagagccagacgtcctttgggtccatgtaccccacacgcattgaaggggccacacgactcttctgtgatgtgtataatcctcagagcaaaacatactgtaagcggctccaggtgctgtgccccgagcactcacgggaccccaaagtaaggttttccctcagctcctcccattttgcccctcctccctgcctcgctgtcccacattcatcccttccttcctcacctcacttttccttcactttttcctctcagcttccctgctgcttcaccctccattcctccttttccatgcctcctcaccgttccctgaaccctccattcttttccttctccctccttgagcccccattcctattctcccttatcaccgctattcatccccccaacctggcctccttgcaggtgccagctgacgaggtatgcgggtgcccccttgtacgtgatgtctttgagctcacgggtgacttctgccgcctgcccaagcgccagtgcaatcgccattactgctgggagaagctgcggcgtgcggaagtggacttggagcgcgtgcgtgt

SEQ ID NO: 8538 - protein, 221 aa, Homo sapiens
MWEHQWASGGQICCLGGVLGGHAAHIHSSLHLCSSLQYESQTSFGSMYPTRIEGATRLFCDVYNPQSKTYCKRLQVLCPEHSRDPKVRFSLSSSHFAPPPCLAVPHSSLPSSPHFSFTFSSQLPCCFTLHSSFSMPPHRSLNPPFFSFSLLEPPFLFSLITAIHPPNLASLQVPADEVCGCPLVRDVFELTGDFCRLPKRQCNRHYCWEKLRRAEVDLERV

SEQ ID NO: 8539 - DNA, 1412 bp, Homo sapiens
tgaagtcggagacgacagaggaactggtttcctccgccccgcaaggcacacagcctgccgacgccccattaatacatgtggaaggggaaagagactgaatggaggaatgaatacaacttgatccaggtcgtgcttcggaagcggtcactttacctgtgaacctctctgcctgacaaacgggcaatgtacggaatcaaccaccaagatggcggcgcccgtgaagaatccgcaattaggtcgccgtcatatgtcgcctaggaacgtacggaattcgacccacgtacggaatcggattccaagatgacggcatctatgaggaagtcacgcagtaggtgcagccatgttgcctgtacgtcgaggccgtacaagcagccgccgtacggactctactgacaaggtggcggcgccctcgggaaagccacattagagcgcggccatgttcccggcgaacatatggattcggccaccatacggatacgataagcaagatggcggcgcctgaggggtcttgggggctctaggccggccacctactggtttgcagcggagacgacgcatggggcctgcgcaataggagtacgctgcctgggaggcgtgactagaagcggaagtagttgtgggcgcctttgcaaccgcctgggacgccgccgagtggtctgtgcaggttcgcgggtcgctggcgggggtcgtgagggagtgcgccgggagcggagatatggagggagatggttcagacccagagcctccagatgccggggaggacagcaagtccgagaatggggagaatgcgcccatctactgcatctgccgcaaaccggacatcaactgcttcatgatcgggtgtgacaactgcaatgagtggttccatggggactgcatccggatcactgagaagatggccaaggccatccgggagtggtactgtcgggagtgcagagagaaagaccccaagctagagattcgctatcggcacaagaagtcacgggagcgggatggcaatgagcgggacagcagtgagccccgggatgagggtggagggcgcaagaggcctgtccctgatccagacctgcagcgccgggcagggtcagggacaggggttggggccatgcttgctcggggctctgcttcgccccacaaatcctctccgcagcccttggtggccacacccagccagcatcaccagcagcagcagcagcagatcaaacggtcagcccgcatgtgtggtgagtgtgaggcatgtcggcgcactgaggactgtggtcactgtgatttctgtcgggacatgaagaagttcgggggccccaacaagatccggcagaagtgccggctgcgccagtgccagctgcgggcccgggaatcgtacaagtacttcccttcctcggtgagtccagccccccagggtggggtggggc

SEQ ID NO: 8540 - protein, 231 aa, Homo sapiens
MEGDGSDPEPPDAGEDSKSENGENAPIYCICRKPDINCFMIGCDNCNEWFHGDCIRITEKMAKAIREWYCRECREKDPKLEIRYRHKKSRERDGNERDSSEPRDEGGGRKRPVPDPDLQRRAGSGTGVGAMLARGSASPHKSSPQPLVATPSQHHQQQQQQIKRSARMCGECEACRRTEDCGHCDFCRDMKKFGGPNKIRQKCRLRQCQLRARESYKYFPSSVSPAPQGGV

SEQ ID NO: 8541 - DNA, 1392 bp, Homo sapiens
tgaagtcggagacgacagaggaactggtttcctccgccccgcaaggcacacagcctgccgacgccccattaatacatgtggaaggggaaagagactgaatggaggaatgaatacaacttgatccaggtcgtgcttcggaagcggtcactttacctgtgaacctctctgcctgacaaacgggcaatgtacggaatcaaccaccaagatggcggcgcccgtgaagaatccgcaattaggtcgccgtcatatgtcgcctaggaacgtacggaattcgacccacgtacggaatcggattccaagatgacggcatctatgaggaagtcacgcagtaggtgcagccatgttgcctgtacgtcgaggccgtacaagcagccgccgtacggactctactgacaaggtggcggcgccctcgggaaagccacattagagcgcggccatgttcccggcgaacatatggattcggccaccatacggatacgataagcaagatggcggcgcctgaggggtcttgggggctctaggccggccacctactggtttgcagcggagacgacgcatggggcctgcgcaataggagtacgctgcctgggaggcgtgactagaagcggaagtagttgtgggcgcctttgcaaccgcctgggacgccgccgagtggtctgtgcaggttcgcgggtcgctggcgggggtcgtgagggagtgcgccgggagcggagatatggagggagatggttcagacccagagcctccagatgccggggaggacagcaagtccgagaatggggagaatgcgcccatctactgcatctgccgcaaaccggacatcaactgcttcatgatcgggtgtgacaactgcaatgagtggttccatggggactgcatccggatcactgagaagatggccaaggccatccgggagtggtactgtcgggagtgcagagagaaagaccccaagctagagattcgctatcggcacaagaagtcacgggagcgggatggcaatgagcgggacagcagtgagccccgggatgagggtggagggcgcaagaggcctgtccctgatccagacctgcagcgccgggcagggtcagggacaggggttggggccatgcttgctcggggctctgcttcgccccacaaatcctctccgcagcccttggtggccacacccagccaggtgagtggctgcataaagtgaatggatgtgtaaagtggttccgtttcagccctgcctgggtccatgatttctgttctgggccccctcctgcagcatcaccagcagcagcagcagcagatcaaacggtcagcccgcatgtgtggtgagtgtgaggcatgtcggcgcactgaggactgtggtcactgtgatttctgtcgggacatgaagaagttcggggg

SEQ ID NO: 8542 - protein, 159 aa, Homo sapiens [sequence omitted]

SEQ ID NO: 8543 - DNA, 1133 bp, Homo sapiens
agcctgcgcttcggaagcatggatgtgcgcctgcgctgcgctagggcgcggcgggcggtttgaattttgcttacagagtcccgtctcaccatcctgggcttccaacggagactgcggtatccgcagctggagacccagcggcgagtagcctgtagtcccagctactcaggagaattgcttgaacctaggaggtggaggttgcagtgagccgagatcgtgccactgcactccagtctgggcaacagagcgagactccatctcagaaaaaaagaaaaaaagactgggtacagatgtgatattggaagaaaaagatcaagctgatgaggttaggatacccaggccctttggacttaaagatcactagtgtctaaattccatcgatggcatttcagtctataggtaaacttcctggaagctggatttggagacagtttatcatctgattattgggctttcgtataggtccttagggagcagcttacctgaaatgcatttagtgtacaccagtctgtaaacttcaacctgtaatgaaagtgtaataaatgtacattgagttgatgtgataatgtgatataataagaaatatatatttgatcttcctatctagttccttgttcagagctcctaaaacccttgtaatttccaaagtgatggagtacatcttttgttctagtatttggtctttgaccccagttcctgacacaaagctcctaaattcctttaaatttcccagtgataggagaattttttgttctaatgaggtcactcttgatgggcacctggataactcaggatgggggctgctcacaaagaccacatcatgattggaagtttcaaactttcagtctcccacctccagagaggggagaggggctggagatttgtgtcaataatccatcaggcctatgtcaacaagacataatccgttaactatggagttcagggagcttcagggttggcaaacattttgatgtgccaggaaggtgacgcactccagctttatgaagtcagcaagtcctgtgctcaggatgcttctggaccttgccccaggtaccccttcatgtggctgttgttcatctgtatcctttgtagtagccttaaaataaactgttaaacacaagtaaagcatttcc

SEQ ID NO: 8544 - protein, 57 aa, Homo sapiens
MRSLLMGTWITQDGGCSQRPHHDWKFQTFSLPPPERGEGLEICVNNPSGLCQQDIIR

SEQ ID NO: 8545 - DNA, 2498 bp, Homo sapiens
cggaagcatggatgtgcgcctgcgctgcgctagggcgcggcgggcggtttgaattttgcttacagagtcccgtctcaccatcctgggcttccaacggagactgcggtatccgcagctggagacccagcggcgagtagccttttgctcccggacggacttgagaggcttaaaggatggcctcgtcagatctggaacaattatgctctcatgttaatgaaaagattggcaatattaagaaaaccttatcattaagaaactgtggccaggaacctaccttgaaaactgtattaaataaaataggagatgagatcattgtaataaatgaacttctaaataaattggaattggaaattcagtatcaagaacaaaccaacaattcactcaaggaactctgtgaatctcttgaagaagattacaaagacatagaacatcttaaagaaaacgttccttcccatttgcctcaagtaacagtaacccagagctgtgttaagggatcagatcttgatcctgaagaaccaatcaaagttgaagaacctgaacccgtaaagaagcctcccaaagagcaaagaagtattaaggaaatgccatttataacttgtgatgagttcaatggtgttccttcgtacatgaaatcccgcttaacctataatcaaattaatgatgttattaaagaaatcaacaaggcagtaattagtaaatataaaatcctacatcagccaaaaaagtctatgaattctgtgaccagaaatctctatcacagatttattgatgaagaaacgaaggataccaaaggtcgttattttatagtggaagctgacataaaggagttcacaactttgaaagctgacaagaagtttcacgtgttactgaatattttacgacactgccggaggctatcagaggtccgagggggaggacttactcgttatgttataacctgagtcccttgtgaacttttgaacataccaacagggtatagagtatagaggctatttctataattttcttatatataatttttttaacttttaatcttttttgtttccttttttttttttttgagacaggatcttgctttgtcacccaggggcttgctttgtcacgcaggctagagtgcagtggcgcaaacatggctcactgcagcctcaacctcccaggctcaagtgatcctcccacctcagccccctgaatggctgggactacaagcgtgcgccaccatgcctggctaatttttgtattttttggagagatggggtttcaccatgttgcctaggctggtcttgagctcctgagctcaaacaatccaccctcctcagcctcccaaagtgctgggattacaggcttgagccaccacacctgacctattcttgtttcttataaaaataaaacttttttggataaagcttatttcttgtttttttctttttctttttttttttttttgagacagtctcgctctttcacccaggccggactgcagcggcgctatctcggctcactgcaaactctgcctcccaggttcacgccatcctcctgcctcactactcaggagaattgcttgaacctaggaggtggaggttgcagtgagccgagatcgtgccactgcactccagtctgggcaacagagcgagactccatctcagaaaaaaagaaaaaaagactgggtacagatgtgatattggaagaaaaagatcaagctgatgaggttaggatacccaggccctttggacttaaagatcactagtgtctaaattccatcgatggcatttcagtctataggtaaacttcctggaagctggatttggagacagtttatcatctgattattgggctttcgtataggtccttagggagcagcttacctgaaatgcatttagtgtacaccagtctgtaaacttcaacctgtaatgaaagtgtaataaatgtacattgagttgatgtgataatgtgatataataagaaatatatatttgatcttcctatctagttccttgttcagagctcctaaaacccttgtaatttccaaagtgatggagtacatcttttgttctagtatttggtctttgaccccagttcctgacacaaagctcctaaattcctttaaatttcccagtgataggagaattttttgttctaatgaggtcactcttgatgggcacctggataactcaggatgggggctgctcacaaagaccacatcatgattggaagtttcaaactttcagtctcccacctccagagaggggagaggggctggagatttgtgtcaataatccatcaggcctatgtcaacaagacataatccgttaactatggagttcagggagcttcagggttggcaaacattttgatgtgccaggaaggtgacgcactccagctttatgaagtcagcaagtcctgtgctcaggatgcttctggaccttgccccaggtaccccttcatgtggctgttgttcatctgtatcctttgtagtagccttaaaataaactgttaaacac

SEQ ID NO: 8546 - protein, 255 aa, Homo sapiens; identical to SEQ ID NO: 1204

SEQ ID NO: 8547 - DNA, 1340 bp, Homo sapiens
ctatttctataattttcttatatataatttttttaacttttaatcttttttgtttccttttttttttttttgagacaggatcttgctttgtcacccaggggcttgctttgtcacgcaggctagagtgcagtggcgcaaacatggctcactgcagcctcaacctcccaggctcaagtgatcctcccacctcagccccctgaatggctgggactacaagcgtgcgccaccatgcctggctaatttttgtattttttggagagatggggtttcaccatgttgcctaggctggtcttgagctcctgagctcaaacaatccaccctcctcagcctcccaaagtgctgggattacaggcttgagccaccacacctgacctattcttgtttcttataaaaataaaacttttttggataaagcttatttcttgtttttttctttttctttttttttttttttcgagactccatctcagaaaaaaagaaaaaaagactgggtacagatgtgatattggaagaaaaagatcaagctgatgaggttaggatacccaggccctttggacttaaagatcactagtgtctaaattccatcgatggcatttcagtctataggtaaacttcctggaagctggatttggagacagtttatcatctgattattgggctttcgtataggtccttagggagcagcttacctgaaatgcatttagtgtacaccagtctgtaaacttcaacctgtaatgaaagtgtaataaatgtacattgagttgatgtgataatgtgatataataagaaatatatatttgatcttcctatctagttccttgttcagagctcctaaaacccttgtaatttccaaagtgatggagtacatcttttgttctagtatttggtctttgaccccagttcctgacacaaagctcctaaattcctttaaatttcccagtgataggagaattttttgttctaatgaggtcactcttgatgggcacctggataactcaggatgggggctgctcacaaagaccacatcatgattggaagtttcaaactttcagtctcccacctccagagaggggagaggggctggagatttgtgtcaataatccatcaggcctatgtcaacaagacataatccgttaactatggagttcagggagcttcagggttggcaaacattttgatgtgccaggaaggtgacgcactccagctttatgaagtcagcaagtcctgtgctcaggatgcttctggaccttgccccaggtaccccttcatgtggctgttgttcatctgtatcctttgtagtagccttaaaataaactgttaaacacaagtaaagcatttcc

SEQ ID NO: 8548 - protein, 57 aa, Homo sapiens; identical to SEQ ID NO: 8544

SEQ ID NO: 8549 - DNA, 7188 bp, Homo sapiens
ggcggcaccggcaccttgcagtatcactggggagacggcggctgtatagcgcttgccgccccacggattatcccagcaggatctacgcaccccgcatcctccgtagttccgccctatccttgtcctccttggctggggcgcccaccggcggtctgataggctacatcgcggcatgagatgaagctgtgacaggtttgaaaacacaaacacaatggcaggaaacagccttgttctacccattgttctttggggtcgaaaagcgcccacacattgcatctcagccgtacttttaacagatgatggggccacgatcgtaacaggatgtcacgacggacaaatatgtctctgggatctttcagtagaactgcaaattaatcctcgagcactgttgtttggtcatacagcatcaatcacttgtttgtctaaagcttgtgcttccagtgacaaacagtatattgtgagtgcatctgaaagtggagagatgtgcctctgggatgtgagtgatggcagatgtattgaatttacaaaattagcttgcacacatactggcatacagttctaccagttctctgttgggaatcagcgagaaggaaggcttttatgccacggacattaccctgaaatccttgttgtggatgctaccagccttgaagtattatactccttagtatcaaagatatcaccagactggattagctccatgagtattattcgatcccaccgaacacaagaggacacagtggtagcactctcggtgactggcatcctgaaggtctggattgttacctcggaaataagtgacatgcaggatactgagccaatatttgaggaggaatccaaaccaatttattgtcagaattgccaaagcatctctttttgtgcatttacacaaaggtcacttttggttgtgtgttccaaatattggagggtgttcgatgccggagactattccttgttgtgttcaggtcctagtgaaaatggacagacatggaccgggggggactttgtctcatcagataaagtcatcatttggacagaaaatgggcaaagttatatttacaaactacctgccagttgccttccagctagtgattcattccgcagtgatgtggggaaggcagttgaaaatttaattcctcctgtacaacatatcctcttggatcgaaaagataaagagttgctaatttgtcctcctgttactcggttcttctatggatgcagagaatatttccataaactgttaattcagggtgattcttctggaaggttgaatatttggaacatatcagacacagctgataaacagggaagtgaagaagggctggcaatgacaacttctattagtttgcaagaggcatttgataaactgaatccttgtcctgctggaattatagatcagctgagtgtgattcccaatagtaatgaacctcttaaagtaactgcaagtgtgtacataccagcacatggacgacttgtttgtggtcgtgaagatggaagcatagttattgtacctgccacacagacggccatagtacagctgttgcaaggggaacacatgctcagaagaggttggccacctcacagaacactccgtggtcatcggaacaaagtcacatgtttgctatatcctcatcaggtctcagctcggtatgatcaaagatacctgatatctggaggtgtggatttttcagtcataatttgggacatattttctggagaaatgaaacatatcttctgtgttcatggtggtgagattactcaacttctagttccacctgaaaactgtagtgcaagagtacagcactgcatctgctctgtagccagtgaccactcagtaggacttctaagtttgcgagagaaaaaatgcataatgttggcatctcgtcacctttttcctattcaagtaatcaaatggaggccttctgatgattacctggtggtggggtgttcagatggttctgtgtacgtctggcaaatggatactggtgcattggatcgttgtgtgatggggataacagcagttgagattctaaacgcttgtgatgaagctgttcctgctgctgttgattcacttagtcatccagcagtcaacctaaaacaagctatgacgagacgtagtcttgctgctcttaaaaatatggcccatcataagctacaaacccttgcaactaacctcttggcttctgaggcatctgacaagggaaatttacctaaatattctcataactccctgatggttcaagcaataaagacaaacctaacagacccggacatacatgtgctattctttgatgtggaagcgttgattattcaactcctgactgaagaagcctctaggccgaatactgctcttatttccccagagaatttgcaaaaagcatctggcagttcagacaaagggggctcttttttaactggaaaacgagcagcagttctcttccaacaagtgaaagaaacgatcaaagagaacatcaaggaacacctccttgatgatgaagaggaggatgaggagataatgaggcagagaagggaagaaagtgatcctgaatatcggtccagcaaatcaaagccattgaccctattagaatataatttaactatggacactgcaaagctgtttatgtcctgccttcacgcctggggtttgaatgaagtactggatgaagtttgcctggatcgccttggaatgctgaaaccccactgcaccgtatcgtttggcctcttgtcaagaggaggccatatgtcactgatgctgccgggttataatcagcctgcttgtaaactgtcacatgggaaaacagaagtaggaaggaagctgccagcgtctgagggagtaggaaagggaacttacggagtgtcccgtgccgtcaccacacagcatctcctgtctatcatttctttggcaaatactttaatgagtatgaccaatgcaacttttattggtgatcatatgaagaagggtcctaccaggccacctagaccaagcaccccagacctttctaaggcaaggggttcccctccaacttccagtaatattgtgcaaggacagattaaacaaggttggagtcagttagctgctatgcactgtgttatgctgccagacctactgggattggataaatttaggcctccccttctggagatgctggcccgaagatggcaagatcgatgcttggaggtgagagaagccgcgcaggccctgcttctggcggaactgagaagaattgagcaggcaggcaggaaggaagccattgatgcctgggctccttacttacctcagtacatagaccacgtcatatcacctggagtcacatcagaagccgcgcagactatcaccacggctcctgatgcctcagggcctgaagcaaaagtccaggaggaagagcatgaccttgttgacgatgacatcaccactggttgcttatcaagtgtcccacaaatgaaaaaaatttctacatcttacgaggaaagacggaagcaagctaccgctattgttttacttggagtaataggagctgaatttggtgctgaaattgaacctcctaaactattgaccagacctcgaagctctagccaaattcctgagggattcgggttgactagtggtggatccaactactcgctggccagacatacttgcaaggcactgacgtttcttctgctacagcctccaagccccaaacttcctccacacagcactatccgaagaacagccattgatctgattggacgtgggttcactgtttgggagccttacatggatgtgtccgctgttctgatggggcttctcgaactttgtgccgatgccgagaaacaacttgccaacatcacaatggggttgcctctgagcccagcagctgactcggcccgctctgcgaggcatgccctctcgctcattgccaccgccagaccacccgccttcatcaccaccatagccaaagaggtacacagacatacggctcttgcagcaaatacccaatcacagcagaatatgcacacaacaactcttgcacgagctaaaggggaaattttgagagtcattgaaattcttattgaaaagatgcccacagatgttgtggatcttctcgtggaggttatggacatcattatgtactgccttgaaggatctttagttaaaaagaaaggtcttcaagaatgtttcccagccatctgcaggttctacatggtcagctattatgagcggaatcacagaatagcagttggagctcgccatggttcagtggccctgtacgacatccggactggaaaatgtcagacaatccatggacacaagggaccaatcactgcagtggcttttgctcctgatggaagatatcttgccacctactcaaacactgacagccacatttctttttggcagatgaacacgtcactgctgggaagcatcggcatgctgaactcggcacctcagctgcgctgcattaaaacctaccaggtgccccctgtgcagcccgcgtcccccggctcccacaatgccctcaagctggcccggctcatctggacttccaaccgcaacgtcatcctcatggcccatgacgggaaggagcaccgcttcatggtctaatgctgctgcctgccgccgtgactgcgttttagttctctaaattatccaagccgatgttgctctgtccttcctcacaccagattgttcccaggggcctgcccaccccagtgccatccagtggcacggccgggtcttgtcacttgtgcatgcttctcaggggcagaacccgctcgtgccatctgtcgattcagaggcacgcacacatgctctgcaggatgtggccatcctgtcaccaggtagtttttccctgccagagatggcaggggaaagccagtggttcctgggaacgctcttgttgcttggtgcaacagaagcacaaaaatcaataaacactgtgattgcactcccagcccagatcagcatttttagccatctcaaccgcacctctgaagtgctgcttgaatctggccgttctgacactgggtgttgaggtcatgtggcagtcctcacgattgaaattattgccctttgaattacctaaaatattgtttaccaaaaagattctgtgtttacatgttcttttcttctggtgattgctaggaaattactcaatccaatttcctagggtttagctaccaccttctttatcaacagctaaccaatttgagattcatgattaattatgtacacaaaaatattttccttgtagaaaatagttttccagacacttagccttctgaagtgctcatctcttgcttaaatgatagtctatttagtagtttaaaataaaaataatcactccctatgatctagttaatgtaattatccagtcactgtaactaatctcttgaagggacttttgtgataaagagccaagttcagaagcatagcgtgtaccgaaaatgaagactctcctatctactgctacagatcctgttgaagaaagagcttacccctttcccccggaaaacttgcaatcctgtagttcccatatgtgtggcatatgtcagttatgaaattattataattcagccttcaaactactactgatcaactaaaggaaagctaataaggtatttcttttaaacaagtattctggaaaagtaataactatggcacaaatgttcaggagtgtatataaaaatatgtgggctctcgatttatttgagcaaacattgcaatgagggtgttcattatgcttctaagtaagctttaactagaccactttcttcttatgtcagattgtgctggttctagctcataataatgaaaaaaatagaattatattttgtatgaattgtttctaacaaaccttgatctgtatatacttgtgaggggttgtttggttgcctaattgttgattggttggttagttgggcaaaatcatttattacatgcaaaaatagaaaattatttgttaaattcagagaaaatatgtgaagtttacaaaggaaccaaaatgataatgggagaatttagtcttaaaagtttaggttgtcagagtttatctgatatacaaaaaagtaggatcaaagtctaggaacaaacattggttatttcactgaaacagatttttaaagagcatattaagaaattaagaccattagatcatctctttcataatgatatgatgttatttccattgacggcaaatctatactgttccttggttttagagttgggtattctttcaaaagtgaatttaggcacatgcatgtacattgtatttataaagattatatatgtagtttccaaggaagaaacaaagacctatacagtttagactttatttgtttggtgaacgtgctgttgtgtttggcatagctagagaaatgtaaggtaaaaggctcactttgttttccagtgggtccagagtcttctctatacccaacatatgtttactttatgaacttaaatggaaattaatttattgtagactacatctctatttggaatgatgaggtaaatgtataccttagcattttctttaacaaaaatgttctgtgtgtcaggaaagaggtgtgagagtggtaggcagcctgccgcaaacacacggatggctccccccgccacgaaggttgagaacaaagccagggggcccagaggagcaatagccctgggccacaagcgtgggtaggcctttcacgtattccgtctgcacaggcaaccaaggccagtagaaagctatggctgcaaaaccctggggtggacgatgtttgatgattagacggtcatctctaactactaaactaatatctgcattcttgttaacataaatctctccttggctattttaatagccacagtcccaaacttcatcccagcttagatttctcagcactgaggtaaactctgcattgtcatcccagcgtacacctttaatgttttattgatttcactggcactgtatttggacctgtccttgtatatgtagagacatatgtggcttcattggtaatttacaagcaaaagatgacatgacgtgacacctgtatgaaaatgtgatgattgaactccctgtgtacagcgagtgaattaaaatgtctgcctctccagacatttcttaatgattccacttaatagactctatgtgtgctgaatgttcctgtgtacatatgtgtgttaaataaaacaattgtattgaagactgtttttctcacaat

SEQ ID NO: 8550 - protein, 1457 aa, Homo sapiens; identical to SEQ ID NO: 1208

SEQ ID NO: 8551 - DNA, 7287 bp, Homo sapiens
ggcggcaccggcaccttgcagtatcactggggagacggcggctgtatagcgcttgccgccccacggattatcccagcaggatctacgcaccccgcatcctccgtagttccgccctatccttgtcctccttggctggggcgcccaccggcggtctgataggctacatcgcggcatgagatgaagctgtgacaggtttgaaaacacaaacacaatggcaggaaacagccttgttctacccattgttctttggggtcgaaaagcgcccacacattgcatctcagccgtacttttaacagatgatggggccacgatcgtaacaggatgtcacgacggacaaatatgtctctgggatctttcagtagaactgcaaattaatcctcgagcactgttgtttggtcatacagcatcaatcacttgtttgtctaaagcttgtgcttccagtgacaaacagtatattgtgagtgcatctgaaagtggagagatgtgcctctgggatgtgagtgatggcagatgtattgaatttacaaaattagcttgcacacatactggcatacagttctaccagttctctgttgggaatcagcgagaaggaaggcttttatgccacggacattaccctgaaatccttgttgtggatgctaccagccttgaagtattatactccttagtatcaaagatatcaccagactggattagctccatgagtattattcgatcccaccgaacacaagaggacacagtggtagcactctcggtgactggcatcctgaaggtctggattgttacctcggaaataagtgacatgcaggatactgagccaatatttgaggaggaatccaaaccaatttattgtcagaattgccaaagcatctctttttgtgcatttacacaaaggtcacttttggttgtgtgttccaaatattggagggtgttcgatgccggagactattccttgttgtgttcaggtcctagtgaaaatggacagacatggaccgggggggactttgtctcatcagataaagtcatcatttggacagaaaatgggcaaagttatatttacaaactacctgccagttgccttccagctagtgattcattccgcagtgatgtggggaaggcagttgaaaatttaattcctcctgtacaacatatcctcttggatcgaaaagataaagagttgctaatttgtcctcctgttactcggttcttctatggatgcagagaatatttccataaactgttaattcagggtgattcttctggaaggttgaatatttggaacatatcagacacagctgataaacagggaagtgaagaagggctggcaatgacaacttctattagtttgcaagaggcatttgataaactgaatccttgtcctgctggaattatagatcagctgagtgtgattcccaatagtaatgaacctcttaaagtaactgcaagtgtgtacataccagcacatggacgacttgtttgtggtcgtgaagatggaagcatagttattgtacctgccacacagacggccatagtacagctgttgcaaggggaacacatgctcagaagaggttggccacctcacagaacactccgtggtcatcggaacaaagtcacatgtttgctatatcctcatcaggtctcagctcggtatgatcaaagatacctgatatctggaggtgtggatttttcagtcataatttgggacatattttctggagaaatgaaacatatcttctgtgttcatggtggtgagattactcaacttctagttccacctgaaaactgtagtgcaagagtacagcactgcatctgctctgtagccagtgaccactcagtaggacttctaagtttgcgagagaaaaaatgcataatgttggcatctcgtcacctttttcctattcaagtaatcaaatggaggccttctgatgattacctggtggtggggtgttcagatggttctgtgtacgtctggcaaatggatactggtgcattggatcgttgtgtgatggggataacagcagttgagattctaaacgcttgtgatgaagctgttcctgctgctgttgattcacttagtcatccagcagtcaacctaaaacaagctatgacgagacgtagtcttgctgctcttaaaaatatggcccatcataagctacaaacccttgcaactaacctcttggcttctgaggcatctgacaagggaaatttacctaaatattctcataactccctgatggttcaagcaataaagacaaacctaacagacccggacatacatgtgctattctttgatgtggaagcgttgattattcaactcctgactgaagaagcctctaggccgaatactgctcttatttccccagagaatttgcaaaaagcatctggcagttcagacaaagggggctcttttttaactggaaaacgagcagcagttctcttccaacaagtgaaagaaacgatcaaagagaacatcaaggaacacctccttgatgatgaagaggaggatgaggagataatgaggcagagaagggaagaaagtgatcctgaatatcggtccagcaaatcaaagccattgaccctattagaatataatttaactatggacactgcaaagctgtttatgtcctgccttcacgcctggggtttgaatgaagtactggatgaagtttgcctggatcgccttggaatgctgaaaccccactgcaccgtatcgtttggcctcttgtcaagaggaggccatatgtcactgatgctgccgggttataatcagcctgcttgtaaactgtcacatgggaaaacagaagtaggaaggaagctgccagcgtctgagggagtaggaaagggaacttacggagtgtcccgtgccgtcaccacacagcatctcctgtctatcatttctttggcaaatactttaatgagtatgaccaatgcaacttttattggtgatcatatgaagaagggtcctaccaggccacctagaccaagcaccccagacctttctaaggcaaggggttcccctccaacttccagtaatattgtgcaaggacagattaaacaagttgctgcacctgtcgtttccgctcggtctgatgctgatcactctggctctgaccctccttctgctcctgctttacatacctgtttcttagtaaatgaaggttggagtcagttagctgctatgcactgtgttatgctgccagacctactgggattggataaatttaggcctccccttctggagatgctggcccgaagatggcaagatcgatgcttggaggtgagagaagccgcgcaggccctgcttctggcggaactgagaagaattgagcaggcaggcaggaaggaagccattgatgcctgggctccttacttacctcagtacatagaccacgtcatatcacctggagtcacatcagaagccgcgcagactatcaccacggctcctgatgcctcagggcctgaagcaaaagtccaggaggaagagcatgaccttgttgacgatgacatcaccactggttgcttatcaagtgtcccacaaatgaaaaaaatttctacatcttacgaggaaagacggaagcaagctaccgctattgttttacttggagtaataggagctgaatttggtgctgaaattgaacctcctaaactattgaccagacctcgaagctctagccaaattcctgagggattcgggttgactagtggtggatccaactactcgctggccagacatacttgcaaggcactgacgtttcttctgctacagcctccaagccccaaacttcctccacacagcactatccgaagaacagccattgatctgattggacgtgggttcactgtttgggagccttacatggatgtgtccgctgttctgatggggcttctcgaactttgtgccgatgccgagaaacaacttgccaacatcacaatggggttgcctctgagcccagcagctgactcggcccgctctgcgaggcatgccctctcgctcattgccaccgccagaccacccgccttcatcaccaccatagccaaagaggtacacagacatacggctcttgcagcaaatacccaatcacagcagaatatgcacacaacaactcttgcacgagctaaaggggaaattttgagagtcattgaaattcttattgaaaagatgcccacagatgttgtggatcttctcgtggaggttatggacatcattatgtactgccttgaaggatctttagttaaaaagaaaggtcttcaagaatgtttcccagccatctgcaggttctacatggtcagctattatgagcggaatcacagaatagcagttggagctcgccatggttcagtggccctgtacgacatccggactggaaaatgtcagacaatccatggacacaagggaccaatcactgcagtggcttttgctcctgatggaagatatcttgccacctactcaaacactgacagccacatttctttttggcagatgaacacgtcactgctgggaagcatcggcatgctgaactcggcacctcagctgcgctgcattaaaacctaccaggtgccccctgtgcagcccgcgtcccccggctcccacaatgccctcaagctggcccggctcatctggacttccaaccgcaacgtcatcctcatggcccatgacgggaaggagcaccgcttcatggtctaatgctgctgcctgccgccgtgactgcgttttagttctctaaattatccaagccgatgttgctctgtccttcctcacaccagattgttcccaggggcctgcccaccccagtgccatccagtggcacggccgggtcttgtcacttgtgcatgcttctcaggggcagaacccgctcgtgccatctgtcgattcagaggcacgcacacatgctctgcaggatgtggccatcctgtcaccaggtagtttttccctgccagagatggcaggggaaagccagtggttcctgggaacgctcttgttgcttggtgcaacagaagcacaaaaatcaataaacactgtgattgcactcccagcccagatcagcatttttagccatctcaaccgcacctctgaagtgctgcttgaatctggccgttctgacactgggtgttgaggtcatgtggcagtcctcacgattgaaattattgccctttgaattacctaaaatattgtttaccaaaaagattctgtgtttacatgttcttttcttctggtgattgctaggaaattactcaatccaatttcctagggtttagctaccaccttctttatcaacagctaaccaatttgagattcatgattaattatgtacacaaaaatattttccttgtagaaaatagttttccagacacttagccttctgaagtgctcatctcttgcttaaatgatagtctatttagtagtttaaaataaaaataatcactccctatgatctagttaatgtaattatccagtcactgtaactaatctcttgaagggacttttgtgataaagagccaagttcagaagcatagcgtgtaccgaaaatgaagactctcctatctactgctacagatcctgttgaagaaagagcttacccctttcccccggaaaacttgcaatcctgtagttcccatatgtgtggcatatgtcagttatgaaattattataattcagccttcaaactactactgatcaactaaaggaaagctaataaggtatttcttttaaacaagtattctggaaaagtaataactatggcacaaatgttcaggagtgtatataaaaatatgtgggctctcgatttatttgagcaaacattgcaatgagggtgttcattatgcttctaagtaagctttaactagaccactttcttcttatgtcagattgtgctggttctagctcataataatgaaaaaaatagaattatattttgtatgaattgtttctaacaaaccttgatctgtatatacttgtgaggggttgtttggttgcctaattgttgattggttggttagttgggcaaaatcatttattacatgcaaaaatagaaaattatttgttaaattcagagaaaatatgtgaagtttacaaaggaaccaaaatgataatgggagaatttagtcttaaaagtttaggttgtcagagtttatctgatatacaaaaaagtaggatcaaagtctaggaacaaacattggttatttcactgaaacagatttttaaagagcatattaagaaattaagaccattagatcatctctttcataatgatatgatgttatttccattgacggcaaatctatactgttccttggttttagagttgggtattctttcaaaagtgaatttaggcacatgcatgtacattgtatttataaagattatatatgtagtttccaaggaagaaacaaagacctatacagtttagactttatttgtttggtgaacgtgctgttgtgtttggcatagctagagaaatgtaaggtaaaaggctcactttgttttccagtgggtccagagtcttctctatacccaacatatgtttactttatgaacttaaatggaaattaatttattgtagactacatctctatttggaatgatgaggtaaatgtataccttagcattttctttaacaaaaatgttctgtgtgtcaggaaagaggtgtgagagtggtaggcagcctgccgcaaacacacggatggctccccccgccacgaaggttgagaacaaagccagggggcccagaggagcaatagccctgggccacaagcgtgggtaggcctttcacgtattccgtctgcacaggcaaccaaggccagtagaaagctatggctgcaaaaccctggggtggacgatgtttgatgattagacggtcatctctaactactaaactaatatctgcattcttgttaacataaatctctccttggctattttaatagccacagtcccaaacttcatcccagcttagatttctcagcactgaggtaaactctgcattgtcatcccagcgtacacctttaatgttttattgatttcactggcactgtatttggacctgtccttgtatatgtagagacatatgtggcttcattggtaatttacaagcaaaagatgacatgacgtgacacctgtatgaaaatgtgatgattgaactccctgtgtacagcgagtgaattaaaatgtctgcctctccagacatttcttaatgattccacttaatagactctatgtgtgctgaatgttcctgtgtacatatgtgtgttaaataaaacaattgtattgaagactgtttttctcacaat

SEQ ID NO: 8552 - protein, 1490 aa, Homo sapiens; identical to SEQ ID NO: 1206

SEQ ID NO: 8553 - DNA, 695 bp, Homo sapiens
gatttagccagatgaacctcttgcttccctcttacgaagttattaaaggtgggtcactgacctaggtggtttctgtggagctgttgatgtgcttctgggatcaaccgtctcgttcttcacatttcatattcccagtaagtatgcagtgccattctcacaggcctttgacaaggtgcattggatcgttgtgtgatggggataacagcagttgagattctaaacgcttgtgatgaagctgttcctgctgctgttgattcacttagtcatccagcagtcaacctaaaacaagctatgacgagacgtagtcttgctgctcttaaaaatatggcccatcataagctacaaacccttgcaactaacctcttggcttctgaggcatctgacaagggaaatttacctaaatattctcataactccctgatggttcaagcaataaagacaaacctaacagacccggacatacatgtgctattctttgatgtggaagcgttgattattcaactcctgactgaagaagcctctaggccgaatactgctcttatttccccagagaatttgcaaaaagcatctggcagttcagacaaagggggctcttttttaactggaaaacgagcagcagttctcttccaacaagtgaaagaaacgatcaaagagaacatcaaggaacacctccttgatgatgaagaggaggatga

SEQ ID NO: 8554 - protein, 166 aa, Homo sapiens
MGITAVEILNACDEAVPAAVDSLSHPAVNLKQAMTRRSLAALKNMAHHKLQTLATNLLASEASDKGNLPKYSHNSLMVQAIKTNLTDPDIHVLFFDVEALIIQLLTEEASRPNTALISPENLQKASGSSDKGGSFLTGKRAAVLFQQVKETIKENIKEHLLDDEEE

SEQ ID NO: 8555 - DNA, 929 bp, Homo sapiens
aggccacctagaccaagcaccccagacctttctaaggcaaggggttcccctccaacttccagtaatattgtgcaaggacagattaaacaaggttggagtcagttagctgctatgcactgtgttatgctgccagacctactgggattggataaatttaggcctccccttctggagatgctggcccgaagatggcaagatcgatgcttggaggtgagagaagccgcgcaggccctgcttctggcggaactgagaagaattgagcaggcaggcaggaaggaagccattgatgcctgggctccttacttacctcagtacatagaccacgtcatatcacgtaagagttctcatgcttctctacaaagctttgcaggaatatgtagaaaaggtacctgtactcacaaatatatatgctactacccatcaacaaaaatgagtcactgaccttaaagtgaaaagaacagatcctcaaattcactttattattttctgaatctctgtagtttggaacttgctttaaaaaacaaaaggcaaaggctgtctatatcaaaatattcattaatgaactgacttttataaatgaattccccatcaaacatcctactctagtactaacatgtgcctccgcccattgcattattatgcttatggatgccagcttgttcgatatggatctgatgatatgcaagtgcagatacaaggcaaactctcttgctagttaaagttgggattgtgaatccttagaaaaacaaagatctgatagagttagactcaggcaatatttacaaagagaaaattgggaaggattttgatggataaatctttcaaaagagtataatttgaaaggattagaaaaattgttgaaattttttgaatattcttttgcaaaataaaagctttataattatgttgctacattgaatgtgcattgg

SEQ ID NO: 8556 - protein, 109 aa, Homo sapiens
MHCVMLPDLLGLDKFRPPLLEMLARRWQDRCLEVREAAQALLLAELRRIEQAGRKEAIDAWAPYLPQYIDHVISRKSSHASLQSFAGICRKGTCTHKYICYYPSTKMSH

SEQ ID NO: 8557 - DNA, 571 bp, Homo sapiens
acatggtcagctattatgagcggaatcacagaatagcagttggagctcgccatggttcagtggccctgtacgacatccggactggaaaatgtcaggcactataccaggcaaaggagaggtgacaaaggagcgggaacacatgtgaagatcctgacctactgctctaaccaaaccatcttccgttaaccataacccaaatcaaaacccacgaaaatgccaagtcccatcatgacggacatttacttaggaatgtgattgctgtccagtgagttagtgtgtacatgtgtctgctgaagtcctgccatgtaaaagcctgaaatgtctagaaagggtggagataatcaagaccattcatgctgctgaggaactccatgtggaagcaggaggggagggatttattttcatagcacagtataagacttctagcatgtgttcaaatagttttctattagaaatactgaaaaaaacatttagctttgggtttgcccagatctgaagaaaacattttgtgtgactttttaggcatatgcaagtgaaactttaataaatatttcatatgagcagtgtaaat

SEQ ID NO: 8558 - protein, 44 aa, Homo sapiens
MVQWPCTTSGLENVRHYTRQRRGDKGAGTHVKILTYCSNQTIFR

SEQ ID NO: 8559 - DNA, 451 bp, Homo sapiens
catcgtttgtatccagtcgctgttcaagaaaacattaatattgaaaaaattgttagttgtttcagagagagtcatttgtctgagtttattggaaaaattaataccgttactataatacttcacattcatgccgaatttgaagaggtcatagggaaaggatgatcttgagcaatgcattttagtgaacatgggggtctttatcgttccacatgttatgtcccttacaggatttcacatatccctattctcagacaggaatagggatatgtgagctatgatagttatgtcccttatagaatttcacatatccctattctcaggcaggaatagggatatgtgactatgatagttatgtcccttacaggatttcacatatccctattctcaggcaggaatagggatatgtgaactatgatagttatgtcccttatagaatttcacaaatccctat

SEQ ID NO: 8560 - protein, 33 aa, Homo sapiens [sequence omitted]

SEQ ID NO: 8561 - DNA, 734 bp, Homo sapiens
ggaagggagcagacaggtgccatattggcaattctaggatggtcccttcccctttggagagatagatcttgcctgttgggccttcaggccaacacacactagcctcgctagaaggaatactgcctgtgtacctccttctttcctcctttgggcctactttgttcttctgaatggctgaaactccaaggcaccatggtctgcacagatggtaactatggtgccaggtgttccacaaggaagggcagcttgtgctaggctctggattagcagggctggggctacattcacttcctccccaagaggccctatctttctataccagtatgtagtttctctgatgagatcagcatggaagccagttgcttggtgtggtccaggaaggcttctgagaggaggctgctgctggaccttgaaggttggggagaagatcactgatgggatttgggagcatgcagaacagcgttattgcttcaccctggcatgccctttccttcatggactggattctccttttatctggattcccccattatatttcctattgcagccataataagtttctccaacttaatgccttagaacaacacaaatttattattttacagttctggaggtgggaagtccaaaatcatcgtcactggtgggtccttggtgctgggcccaccttccagtaggtttcaagaactgtgtgcccataaataaatcctccaaagagatgccaatcagcaggtacc

SEQ ID NO: 8562 - protein, 79 aa, Homo sapiens
MGFGSMQNSVIASPWHALSFMDWILLLSGFPHYISYCSHNKFLQLNALEQHKFIILQFWRWEVQNHRHWWVLGAGPTFQ

SEQ ID NO: 8563 - DNA, 447 bp, Homo sapiens
aggtgatggaagattcacgagggtgttagccatggaggtctggtgaaccgtgtgctttcttgggacatctggagtttcctgtccagcatcagttatgctcgctacttggtgcatccgattctgatcatcctttacaatggccttcaggaaacacttattcaccacactgacaccaacatgttctatcttttctctggacaccgtgtgctgaccttcgtcactgggctggccctgacgctgttcattgagaaaccatgtcaggaactgaagcagcacctgctgggccatgaatgttctggttaaaacacaaaagaatggatgggccttgttggtaatgacgagcaaagatgaggtggccttatctaggtgatgaatgcttgtattcccgagaaggggtgtgaatctcattttgtgaaagtttaatatatacattttctttgcatttaa

SEQ ID NO: 8564 - protein, 41 aa, Homo sapiens
MFYLFSGHRVLTFVTGLALTLFIEKPCQELKQHLLGHECSG

SEQ ID NO: 8565 - DNA, 725 bp, Homo sapiens
atgtatgtaagccaaagtgacggcataaggagttctttgttagaaaacagggaaagagaagcaagagagcaggcaggcagaagggcagccaggaccatcagctcggtgccagccatagcaatagtttcagacccgtggagtcagctgtgctgttgccaacctccatcacctgtccgcctttatcctgggctctgttcctgtggatttgaacaaatagatgagcggcatcggaagaaagctttagctgcatgtgtttgggtgaccacgagagggcagcacgtaagagaccagtgtcggccccgctgccttcttgaacacaccggaagcctcctaggaaaactgcagattttgtcagactgtgaagtagaagagtcaaagagccttcattgcttccttttaaatgaccagcctactaaggaatttagaatgcccaagtaaggactgctggtcagactggacttcaaaattcctggatccttaagacccaatgcatcagacaaatgtcctgctggatcctcccaccgtcagctaagggacagtgctagctctctggtgagggagatccgtgtggaggtctctggcattcctgggtcagtggatggctgggagaactgctcagctccaggttccagggcctctgatcaaagccaaccctgggggccagccagagatatcgcaaacctaaggactaacgtggaatctacacctgccttgggagtaaagaa

SEQ ID NO: 8566 - protein, 145 aa, Homo sapiens
MYVSQSDGIRSSLLENREREAREQAGRRAARTISSVPAIAIVSDPWSQLCCCQPPSPVRLYPGLCSCGFEQIDERHRKKALAACVWVTTRGQHVRDQCRPRCLLEHTGSLLGKLQILSDCEVEESKSLHCFLLNDQPTKEFRMPK

SEQ ID NO: 8567 - DNA, 825 bp, Homo sapiens
ggacgctgggccggtgggcgggggccggcaggtgctccgcagccgtctgtgccacccagagccggcgggccgctaggtccccggagaccctgctatggtgcgtgcgggcgccgtgggggctcatctccccgcgtccggcttggatatcttcggggacctgaagaagatgaacaagcgccagctctattaccaggttttaaacttcgccatgatcgtgtcttctgcactcatgatatggaaaggcttgatcgtgctcacaggcagtgagagccccatcgtggtggtgctgagtggcagtatggagccggcctttcacagaggagacctcctgttcctcacaaatttccgggaagacccaatcagagctggtgaaatagttgtttttaaagttgaaggacgagacattccaatagttcacagagtaatcaaagttcatgaaaaagataatggagacatcaaatttctgactaaaggagataataatgaagttgatgatagaggcttgtacaaagaaggccagaactggctggaaaagaaggacgtggtgggaagagcaagagggtttttaccatatgttggtatggtcaccataataatgaatgactatccaaaattcaagtatgctcttttggctgtaatgggtgcatatgtgttactaaaacgtgaatcctaaaatgagaagcagttcctgggaccagattgaaatgaattctgttgaaaaagagaaaaactaatatatttgagatgttccattttctgtataaaagggaacagtgtggagatgtttttgtcttgtccaaataaaagattcaccagtaaagatgg

SEQ ID NO: 8568 - protein, 192 aa, Homo sapiens; identical to SEQ ID NO: 1210

SEQ ID NO: 8569 - DNA, 757 bp, Homo sapiens
acgctgggccggtgggcgggggccggcaggtgctccgcagccgtctgtgccacccagagccggcgggccgctaggtccccggagaccctgctatggtgcgtgcgggcgccgtgggggctcatctccccgcgtccggcttggatatcttcggggacctgaagaagatgaacaagcgccagctctattaccaggttttaaacttcgccatgatcgtgtcttctgcactcatgatatggaaaggcttgatcgtgctcacaggcagtgagagccccatcgtggtggtgctgagtggcagtatggagccggcctttcacagaggagacctcctgttcctcacaaatttccgggaagacccaatcagagctggtgaaatagttgtttttaaagttgaaggacgagacattccaatagttcacagagtaatcaaagttcatgaaaaagataatggagacatcaaatttctgactaaaggagataataatgaagttgatgatagaggcttgtacaaagaaggccagaactggctggaaaagaaggacgtggtgggaagagcaagaggtatgctcttttggctgtaatgggtgcatatgtgttactaaaacgtgaatcctaaaatgagaagcagttcctgggaccagattgaaatgaattctgttgaaaaagagaaaaactaatatatttgagatgttccattttctgtataaaagggaacagtgtggagatgtttttgtcttgtccaaataaaagattcaccagt

SEQ ID NO: 8570 - protein, 161 aa, Homo sapiens
MVRAGAVGAHLPASGLDIFGDLKKMNKRQLYYQVLNFAMIVSSALMIWKGLIVLTGSESPIVVVLSGSMEPAFHRGDLLFLTNFREDPIRAGEIVVFKVEGRDIPIVHRVIKVHEKDNGDIKFLTKGDNNEVDDRGLYKEGQNWLEKKDVVGRARGMLFWL

SEQ ID NO: 8571 - DNA, 2322 bp, Homo sapiens
cggtgggcgggggccggcaggtgctccgcagccgtctgtgccacccagagccggcgggccgctaggtccccggagaccctgctatggtgcgtgcgggcgccgtgggggctcatctccccgcgtccggcttggatatcttcggggacctgaagaagatgaacaagcgccagctctattaccaggttttaaacttcgccatgatcgtgtcttctgcactcatgatatggaaaggcttgatcgtgctcacaggcagtgagagccccatcgtggtggtgctgagtggcagtatggagccggcctttcacagaggagacctcctgttcctcacaaatttccgggaagacccaatcagagctggtgaaatagttgtttttaaagttgaaggacgagacattccaatagttcacagagtaatcaaagttcatgaaaaagataatggagacatcaaatttctgactaaaggagataataatgaagttgatgatagaggcttgtacaaagaaggccagaactggctggaaaagaaggacgtggtgggaagagcaagagggtgaggattcacctttaagttatatagaaggttatgaaaaacacttagaaatgaagaaattaaatcaataggctaatgagtcgttaattacaaatatgacatatcaggagagttttaagcagttctagtttatcctgtgaagactaaatacaacttagaaattcctaaagacctaaaatctaaaactgaacccaattatattatctatatgatgggttcaaatctgtttcaaaataaatccagccaggcgcagtggctcacacctgtaatcccagcacctttgggaggctgaggcaggaggatcacttgagcccaggagttccagaccagcctgagtaacatagggataccccatctctattaataaaaattttaaaaaatttgttctaaaaaaagaagaaatataaatcctcactgagagattagttatttgtggattttaaataaccattacaagaaagtctcccagagataaccactgtttaacatttcagggaatgctgtaggtactctctgggctggtacagatgtgtgttatgcatatatataattttacttagaatttgattatttttcacccaacaggaagttggaaatagcttttcgtgtcaaatctacatctgtatctttttaagtggctacaagctgttttattgcgaataattatttatttaaccaatccccttttggtggacacttagattatttcctgtttttcgcaactaaaaacatttctgtgatacatcttttagtattcatctttgtatagttgtccagcaatgagttctgcttctgattgacataacagagaatgtatcctcattaaaaaccaaacaagggaattcttcccctctcttggcaaccctttttatgtttaacagccattagaaatgtttttttatcttacctaaatctcactagctttttaaggctggagagactggctcccattttgtcaggtttagcgttattagtcagattgtggcttacagcttcttcctcctcctttaaccatttttctttgttgcattttcacttgaacatctccggggggaccaggagggcttccagttagtccatcctgtctttccagacactctggtgaaaggctttggataagagagaggatggaactactgatttataaaagactggagggtacctatgggtgtgttaccttgtttcccatgagcagagatgattgagacctgggtccatctgattacatattgctgttgattttgtgagcataatcgttggctggtttatgcactgaacctccttgctctgggatcataatcatatttgagtataagttatggtattcacatttgtatttgctacccaatacatttatttgttatatctgacaagcactgggaaatgaaaataattatttgcattacaaactcattattcatgtactttgaaagctttatctaacagcagtttttatatgggctatctgaatcttatcttctaaataaaaactagatttgtgaaagttgcctattctttttgtacaagcggcttaactattttaattgtagcaagtgaagacaaccagcatcactatctcaacccaagtgcctacttagaaaacttgtcctggctgccagtgctgatgctccttactaataaagctgtttgagacagggctgaatacatccttacagccctggtcagtggcattccctcgtacaattcatttcttaagactgatctatagtgttttcagatgttgccatcatcatgttataagcagcttttat

SEQ ID NO: 8572 - protein, 156 aa, Homo sapiens
MVRAGAVGAHLPASGLDIFGDLKKMNKRQLYYQVLNFAMIVSSALMIWKGLIVLTGSESPIVVVLSGSMEPAFHRGDLLFLTNFREDPIRAGEIVVFKVEGRDIPIVHRVIKVHEKDNGDIKFLTKGDNNEVDDRGLYKEGQNWLEKKDVVGRARG

SEQ ID NO: 8573 - DNA, 731 bp, Homo sapiens
ggggccggcaggtgctccgcagccgtctgtgccacccagagccggcgggccgctaggtccccggagaccctgctatggtgcgtgcgggcgccgtgggggctcatctccccgcgtccggcttggatatcttcggggacctgaagaagatgaacaagcgccagctctattaccaggttttaaacttcgccatgatcgtgtcttctgcactcatgatatggaaaggcttgatcgtgctcacaggcagtgagagccccatcgtggtggtgctgagtggcagtatggagccggcctttcacagaggagacctcctgttcctcacaaatttccgggaagacccaatcagagctgagataatggagacatcaaatttctgactaaaggagataataatgaagttgatgatagaggcttgtacaaagaaggccagaactggctggaaaagaaggacgtggtgggaagagcaagagggtttttaccatatgttggtatggtcaccataataatgaatgactatccaaaattcaagtatgctcttttggctgtaatgggtgcatatgtgttactaaaacgtgaatcctaaaatgagaagcagttcctgggaccagattgaaatgaattctgttgaaaaagagaaaaactaatatatttgagatgttccattttctgtataaaagggaacagtgtggagatgtttttgtcttgtccaaataaaagattcaccagtaaagatg

SEQ ID NO: 8574 - protein, 99 aa, Homo sapiens
MVRAGAVGAHLPASGLDIFGDLKKMNKRQLYYQVLNFAMIVSSALMIWKGLIVLTGSESPIVVVLSGSMEPAFHRGDLLFLTNFREDPIRAEIMETSNF

SEQ ID NO: 8575 - DNA, 586 bp, Homo sapiens
gctccgcagccgtctgtgccacccagagccggcgggccgctaggtccccggagaccctgctatggtgcgtgcgggcgccgtgggggctcatctccccgcgtccggcttggatatcttcggggacctgaagaagatgaacaagcgccagttgaggaaaatgatgttgcccagagccacgtgatccaggtcctcactccaaactcaattcaaaagtatgttctggaaagctggtagggagctaaggtgggatctaacctgtctaacatcactgcctccaaaacactaaaactatattaatagcaaggagagtttagaagttatcagttactccaggatacgcccgggaaaaggaaacaagatcagccaaatactagaagctggaaaacagatggaagaatgggaactggcacagccagagaaagccaggatgtgagcggcactgggggaggctgtggctcttcaggtttgtgaggcagagagagtcctcagagacccaggaattggtgtccccagaactgaaggtgaaggggaccgtagggctgaaatcagtttgattgggtagaaaagcagagaagcagtgagaccc

SEQ ID NO: 8576 - protein, 39 aa, Homo sapiens
MVRAGAVGAHLPASGLDIFGDLKKMNKRQLRKMMLPRAT

SEQ ID NO: 8577 - DNA, 851 bp, Homo sapiens
ccagcggctgcggcggcggagctcctccgaggtccgggtcaccagtctctgctcttcccagcctctccggcgcgctccaagggcttcccgtcgggaccatgcgcggccgtgagctcccgctggtcctgctggcgctggtcctctgcctggcgccccgggggcgagcggtcccgctgcctgcgggcggagggaccgtgctgaccaagatgtacccgcgcggcaaccactgggcggtggggcacttaatggggaaaaagagcacaggggagtcttcttctgtttctgagagagggagcctgaagcagcagctgagagagtacatcaggtgggaagaagctgcaaggaatttgctgggtctcatagaagcaaaggagaacagaaaccaccagccacctcaacccaaggccctgggcaatcagcagccttcgtgggattcagaggatagcagcaacttcaaagatgtaggttcaaaaggcaaagttggtagactctctgctccaggttctcaacgtgaaggaaggaacccccagctgaaccagcaatgataatgatggcctctctcaaaagagaaaaacaaaacccctaagagactgcgttctgcaagcatcagttctacggatcatcaacaagatttccttgtgcaaaatatttgactattctgtatctttcatccttgactaaattcgtgattttcaagcagcatcttctggtttaaacttgtttgctgtgaacaattgtcgaaaagagtcttccaattaatgcttttttatatctaggctacctgttggttagattcaaggccccgagctgttaccattcacaataaaagcttaaacacattgtccaaaggg

SEQ ID NO: 8578 - protein, 148 aa, Homo sapiens; identical to SEQ ID NO: 1216

SEQ ID NO: 8579 - DNA, 2933 bp, Homo sapiens
aaggcggcagcgggctgagcgctcggccacccccagcgtgcgcagcccgggcgggcttcgcccgcggagcttgacctagggtcgggacccgtcgggttgcaccgccgcactcgggaagacccggcttcgagcctctcctctccgtctccaaagcgccctcccgcctcccggcgctccccatgcacctgccgggctgcgcgccagccatggccgacgggagcttctcgcttgccggccacctgctccgcagcccgggcgggagcacctcgcgacttcacagcatcgaggccatcctggggtttaccaaggacgacgggatcctcggcaccttcccggcggagcggggcgcccggggcgcgaaggagcgggataggaggctgggcgcgcggcccgcctgccccaaggcgcccgaggaaggctccgagccctccccgccgccagccccggcgcccgcccccgagtacgaaggtgtggttccagaaccgacgggctaagtggcggcggcaggagaagctggaagtgtcctccatgaagctgcaggactcgcccctcctctccttcagccgctccccgccctccgcgacgctgtcgcccctcggggcgggcccgggcagcggtggcgggccggctgggggcgcgctgccgctggagtcctggctcgggccgccgctgccgggcgggggcgccacggcgctgcagagcctgccgggcttcgggccgccggcgcagagcctgcctgccagctacacgccaccgccgccgcctccgcccttcctgaactccccgccgttgggccccggcctgcaacctctcgcgccgccgccgccctcctacccgtgcgggcccggcttcggggacaagttcccgctggacgaggcggacccgcgcaacagcagcatcgcggcgctgcgtctgaaagccaaggagcacatccaggccatcgggaagccgtggcaggccctctaggggcactggggaacgtcttgggatccgaccccgggccgaccgcaccgtacccgcatcctctctcccagggacaacccccctccccagctcggcccctctttccctgtcgcctgcagccacccgccaagcatagttcagggccacgcgcctgctcccgatgcacggggagaagggcgactttcaggcctgaggagaggccctctggccgcctcaacgcacttcgcggacctcagccctgcagctggagggcaacaggctgccgggccccgctggccacgccgctcccatcaccgcaggcgctggagcctccaggcccaaacaggctgaagctcctaaacttggccattcccaggaggcttggagacccccagataaccataacagggaagcaggggaggcggaaaaatagagtttgagaaacttttgtataagtagtttcaaactatttgagaggagaattaaagacatgcttgttttgtttcgactctgtttaagcacgctcaggacttggggagaggagtgaatattggggtacgggaggagggtgcgttgacggacagggtgggtcagggaaagaggaggactgagaagaagctcagggtttccttgtgaaaattctagggacacttcgctgcagcagagaatcgtccccattccgaacgcttcggcggcctagaccagaggcgcccttccctggagccggcgtgcgcgcttggggtccggagtggatggggctaaggctcagatgctagcgcgctcccagttcccccgctagccccatagtccagcggcagctgatattttcaagtttgacttcaatagaaagcgtcaagaccaccttccctagggcgagagcgaagtgtcccccggcccctggcgtccccgctctcctaaggactcctctcagttcaccaagcagatctccggttcggtgccagtccctaacacccaaggttgatcaccagcggtacaagaactgaggcaaagagatgcttttccttttcggagccgcgagactctctaacctccccaactcgctccacactcgccaacccagagttcggtaaaaggcgcgtctggtgaggtgccgcgctcggagagtgtcctggagcgccctacgccaccgccccgagagctagttcttgcgggcgtgccctggacagtatctgcagttctttggcgccggctctagggcgaggaaggaatctcgaaatctcagcccgcttcacaatctcctgagactctctgaagaaggagagtcccggactcccgcctgagcgtgctcgatatccaccgttgacactggaagctgggcgaccgccagcagaacctggatgcccgccaacaggtcctggcacggggggggggggggcgtccaccccacaacccccgtccctaagcgtgctttcaggatgatgcccccagagccttaattagcatcaactggctactgtctgtcggtcctgagcaaattagtgaagctcccagtcccctttcctcgtctaaataaactctgtctctctggaaggtgggaaagatggaataagatcacctgtaaaggctttgtggaaagtaccaagaccctggcatgacgcaatatggattgtaatcatcgtccccatttccccgaaattccctggctgttctccggttcctgaaaccgacttgggaaaaggatgaccacgctggagctgggaatatgggaagcctcatcatagtttccagtcctttctctgcgggtctaagaggctattgcataaccagggctgtgtacccctagacctccagatggtgccttgcacacagtaggctgatcagtaaaaatgtactgaataaattattcccccccaagaggtagggagtaatatctgcacttttcctcacaaggatgtctccttgggggaggaggatggagcagcccgtgtgttatcaccttttagcaagaaaacaaaacaaaacaaaaccag

SEQ ID NO: 8580 - protein, 104 aa, Homo sapiens
MHLPGCAPAMADGSFSLAGHLLRSPGGSTSRLHSIEAILGFTKDDGILGTFPAERGARGAKERDRRLGARPACPKAPEEGSEPSPPPAPAPAPEYEGVVPEPTG

SEQ ID NO: 8581 - DNA, 1431 bp, Homo sapiens
gcgctcggccacccccagcgtgcgcagcccgggcgggcttcgcccgcggagcttgacctagggtcgggacccgtcgggttgcaccgccgcactcgggaagacccggcttcgagcctctcctctccgtctccaaagcgccctcccgcctcccggcgctccccatgcacctgccgggctgcgcgccagccatggccgacgggagcttctcgcttgccggccacctgctccgcagcccgggcgggagcacctcgcgacttcacagcatcgaggccatcctggggtttaccaaggacgacgggatcctcggcaccttcccggcggagcggggcgcccggggcgcgaaggagcgggataggaggctgggcgcgcggcccgcctgccccaaggcgcccgaggaaggctccgagccctccccgccgccagccccggcgcccgcccccgagtacgaaggtgtggttccagaaccgacgggctaagtggcggcggcaggagaagctggaagtgtcctccatgaagctgcaggactcgcccctcctctccttcagccgctccccgccctccgcgacgctgtcgcccctcggggcgggcccgggcagcggtggcgggccggctgggggcgcgctgccgctggagtcctggctcgggccgccgctgccgggcgggggcgccacggcgctgcagagcctgccgggcttcgggccgccggcgcagagcctgcctgccagctacacgccaccgccgccgcctccgcccttcctgaactccccgccgttgggccccggcctgcaacctctcgcgccgccgccgccctcctacccgtgcgggcccggcttcggggacaagttcccgctggacgaggcggacccgcgcaacagcagcatcgcggcgctgcgtctgaaagccaaggagcacatccaggccatcgggaagccgtggcaggccctctaggggcactggggaacgtcttgggatccgaccccgggccgaccgcaccgtacccgcatcctctctcccagggacaacccccctccccagctcggcccctctttccctgtcgcctgcagccacccgccaagcatagttcagggccacgcgcctgctcccgatgcacggggagaagggcgactttcaggcctgaggagaggccctctggccgcctcaacgcacttcgcggacctcagccctgcagctggagggcaacaggctgccgggccccgctggccacgccgctcccatcaccgcaggcgctggagcctccaggcccaaacaggctgaagctcctaaacttggccattcccaggaggcttggagacccccagataaccataacagggaagcaggggaggcggaaaaatagagtttgagaaacttttgtataagtagtttcaaactatttgagaggagaattaaagacatgcttgttttgtttcg

SEQ ID NO: 8582 - protein, 104 aa, Homo sapiens; identical to SEQ ID NO: 8580

SEQ ID NO: 8583 - DNA, 1711 bp, Homo sapiens
ctgggactaaggcggcagcgggctgagcgctcggccacccccagcgtgcgcagcccgggcgggcttcgcccgcggagcttgacctagggtcgggacccgtcgggttgcaccgccgcactcgggaagacccggcttcgagcctctcctctccgtctccaaagcgccctcccgcctcccggcgctccccatgcacctgccgggctgcgcgccagccatggccgacgggagcttctcgcttgccggccacctgctccgcagcccgggcgggagcacctcgcgacttcacagcatcgaggccatcctggggtttaccaaggacgacgggatcctcggcaccttcccggcggagcggggcgcccggggcgcgaaggagcgggataggaggctgggcgcgcggcccgcctgccccaaggcgcccgaggaaggctccgagccctccccgccgccagccccggcgcccgcccccgagtacgaagcccctcgaccctactgccccaaggagcccggggaggcacggccgagcccagggctgcccgtcgggccagccaccggcgaagcgaaactgtcagaggaggaacagcccaagaaaaagcatcggcggaaccgcacgactttcaccacgtaccagctgcatgagctggagcgcgcgttcgagaagtcccactacccggacgtgtacagccgcgaggagctggccggcaaggtcaacctaccagaggtccgggtccaggtgtggttccagaaccgacgggctaagtggcggcggcaggagaagctggaagtgtcctccatgaagctgcaggactcgcccctcctctccttcagccgctccccgccctccgcgacgctgtcgcccctcggggcgggcccgggcagcggtggcgggccggctgggggcgcgctgccgctggagtcctggctcgggccgccgctgccgggcgggggcgccacggcgctgcagagcctgccgggcttcgggccgccggcgcagagcctgcctgccagctacacgccaccgccgccgcctccgcccttcctgaactccccgccgttgggccccggcctgcaacctctcgcgccgccgccgccctcctacccgtgcgggcccggcttcggggacaagttcccgctggacgaggcggacccgcgcaacagcagcatcgcggcgctgcgtctgaaagccaaggagcacatccaggccatcgggaagccgtggcaggccctctaggggcactggggaacgtcttgggatccgaccccgggccgaccgcaccgtacccgcatcctctctcccagggacaacccccctccccagctcggcccctctttccctgtcgcctgcagccacccgccaagcatagttcagggccacgcgcctgctcccgatgcacggggagaagggcgactttcaggcctgaggagaggccctctggccgcctcaacgcacttcgcggacctcagccctgcagctggagggcaacaggctgccgggccccgctggccacgccgctcccatcaccgcaggcgctggagcctccaggcccaaacaggctgaagctcctaaacttggccattcccaggaggcttggagacccccagataaccataacagggaagcaggggaggcggaaaaatagagtttgagaaacttttgtataagtagtttcaaactatttgagaggagaattaaagacatgcttgttttgtttcg

SEQ ID NO: 8584 - protein, 346 aa, Homo sapiens
MHLPGCAPAMADGSFSLAGHLLRSPGGSTSRLHSIEAILGFTKDDGILGTFPAERGARGAKERDRRLGARPACPKAPEEGSEPSPPPAPAPAPEYEAPRPYCPKEPGEARPSPGLPVGPATGEAKLSEEEQPKKKHRRNRTTFTTYQLHELERAFEKSHYPDVYSREELAGKVNLPEVRVQVWFQNRRAKWRRQEKLEVSSMKLQDSPLLSFSRSPPSATLSPLGAGPGSGGGPAGGALPLESWLGPPLPGGGATALQSLPGFGPPAQSLPASYTPPPPPPPFLNSPPLGPGLQPLAPPPPSYPCGPGFGDKFPLDEADPRNSSIAALRLKAKEHIQAIGKPWQAL

SEQ ID NO: 8585 - DNA, 473 bp, Homo sapiens
gccggcgctcaagtccgaggggactgggaggagttacaacagatatagacggacaaactaaacgcgaggtccgggacttcgtacaacccagccaagaaaggagtgggtcccgaaaagggagccagcgaggggaaattcaaactgcgacgagtgcggggctgggaagccttcggctgggtctcggcgcttccagggggcacaggccagggtggcggccccgcggagcgccctcccgcctcccggcgctccccatgcacctgccgggctgcgcgccagccatggccgacgggagcttctcgcttgccggccacctgctccgcagcccgggcgggagcacctcgcgacttcacagcatcgaggccatcctggggtttaccaaggacgacgggatcctcggcaccttcccggcggagcggggcgcccggggcgcgaaggagcgggataggaggctgggcgcgcggcccgcctgcccc

SEQ ID NO: 8586 - protein, 73 aa, Homo sapiens
MHLPGCAPAMADGSFSLAGHLLRSPGGSTSRLHSIEAILGFTKDDGILGTFPAERGARGAKERDRRLGARPAC

SEQ ID NO: 8587 - DNA, 1914 bp, Homo sapiens
ggaggttttctcttgggtttgtttggattttttttttcagcttttgtctgaattttggttttatttttctggggcagagaaaatggctttccttatgaaaagtatgataagtaaccaggtaaagaatttaggatttggtggtgggtctgaagaaaataaagaagaaggaggtgcatctgatcctgcagcagctcaagggatgactagagaggagtatgaggagtatcaaaagcaaatgattgaggagaagatggaaagagatgctgcatttacacagaaaaaggcagaaagggcatgcctcagagttcatctcagagaaaaatacaggctcccaaagtgcacagggatatgcatgtctcccccgtgttgtaggtgagactgttcatccagaatacttccagaaattggaccttctccatacagccacgatcaaggagtcgctttatactacaacttcctcacgtttggaaatgtgtgtctcccaaccatccgaagtttaatggggctttagctgtgtctaaggttggccgcaggtgggggatggaaggaggggttttctttgatccatctaatgaattaatgaattaatcagaggtggggttcagaagccaggctccttactgttgctgaagcagggctgattatgagctagcctaactgctggaaaaatgcagcttcatgctagaagaattagggacatggcccagtccattcatcttccctaatcgagttcttgggaaatacacacgtagattagcccctaacaatgacccccggctgattgcttggagtaccctccaccgtgcccacaatggtactgactagctctttatgtcctgcacaaaggaagccccaactcccccttgtcctcctctgccctgtctcccccacccccatcaccaccacccctgccctcgccagtggctgttgaagtcttttctgcttttttccccagactctgaaacaaacagtaaataaaagctaacctcacctggacttattaggaggagctgggcagttccagaggaattaactttggaaaacaaggccataaaccccttagcagcgtgtgggcaggagcttaaggaaacgctgccaatctttgtttagcggtgattatcgagatcaatttaatattggggaagtttgcataaaaagcattctcggtcagagggggaacaacaaataccaattaattatccccacagctgccctctgatcaccaccacctcagcacgtcagccacctggtctatgtcactggcagtcagaccttttcgggtgccaccaggccatttgtgggccctggaaaggtggaggaggggcggaggaggaggcaaaacctggtctgtcaggggactttccagagggtttgttaatttgccctggatgccggtacccaaagcccactctctataggctctgactttatttcttctgggagctaaactgcttctacctccgcctcttagatgcagaatccagtctcagggaaggattaaagacagactgcaggctaagatgggctttgattcttttcaaaaagatcacacactacaataataattacaaatgagctgcaggcagaaaacactggacaaggagtcagtggcctgagttctagtcctgacccttccacttaatagctgtatcactttgagcctcagtttcctcttctgtaaaatggggaccaatatgtctgtcctgctcacctcacaaggttgtgaagatcagatgacatgaagaatgtgagaagattctgaaacctacaaagtgacatgtcgagagaattgcttgagcccaggagttccaggctgcagtgagccaccatcatgccactgcactccagcctgggcaacagagagggaccctgtctctaaaataaacagacaaataaataataagtaaataaagt

SEQ ID NO: 8588 - protein, 97 aa, Homo sapiens
MAFLMKSMISNQVKNLGFGGGSEENKEEGGASDPAAAQGMTREEYEEYQKQMIEEKMERDAAFTQKKAERACLRVHLREKYRLPKCTGICMSPPCCR

SEQ ID NO: 8589 - DNA, 1962 bp, Homo sapiens
agcttacggccgacaaaccactcttctctatcagtatgcccttgaatagatgaggttgtgcaaagtcctttgctcttaaatgtattgctgtcattgagaatatttggaggttttctcttgggtttgtttggattttttttttcagcttttgtctgaattttggttttatttttctggggcagagaaaatggctttccttatgaaaagtatgataagtaaccaggtaaagaatttaggatttggtggtgggtctgaagaaaataaagaagaaggaggtgcatctgatcctgcagcagctcaagggatgactagagaggagtatgaggagtatcaaaagcaaatgattgaggagaagatggaaagagatgctgcatttacacagaaaaaggcagaaagggcatgcctcagagttcatctcagagaaaaatacaggctcccaaagagtgaaatggatgagaatcaaatccagatggctggagatgatgtggatttacctgaagatctccggaaaatggtagatgaagatcaagaagaggaagaagataaagattctattcttgggcagatacagaatctccagaacatggacttggataccataaaagaaaaagcccaggccaccttcactgaaatcaagcagacagcggagcagaagtgttccgtgatgtgaggggtgggaggggtggagggagggaaccagccatccttggaaaagaccactctcttgtgggacgtttcaagcagtacatgttttaatgtagtgaacacagttaggaaaaccacgatgatccattgacagacaataatttggttgttctaaatattcctggcagagcatttagctaacaccttgcagcgggaaccttactttccttttagttataaatgagataaactggaaaatttcagttgtaaatgatgatgcagaacacatatctgcttaaagaccttgagatgagccaggaagaaacaaaagcaaggggcatttcctctccaactttcttccttggaggccaagttctcaccctgtccaactattcgcaggacaccaggtcccttcagagagaaatgtggagagtcaaggtgtctactgggagccgggtttcccacagggagctgagtctacagactccagggcaatcaaaggtcaccacccccacccctcacctctaggatccttgaatttgtcaatgatactcatcaagtatgcttggatcctttggtccttggatgcttctcagccaagtggcggtagcacagatgtggtgaacaatgacgaattgaggcagggaatagacctcactagccctttgcaatggagatcatcgttctagtggccatgtgaagaatggaaccaagggaggcacaattagaggcagagggaaaccaggcagacggctgctctttttgagttgagcttaactctccttgtctgaacttggtgatagcaatgggaacaaagtgggtagactaacagagagcattaagaagttaaatcaatctctctctgtctcctcccaacctctctctctctttcatccccttctctccctatctctcttttttttttcttctcctgtcccttcccatcccacccctttagactaccttccagtaaatcacactgtcatttggtgccacaagctttcagggtagacactgatttttcccccctaatatctgctctctttcaaaaggaataattcaaaagacttaggacaattaccactgaaacacttcgagctatttagctaaagcccaccaaaccaaaacaaaatactgatttttttttttttttttggtgactctgttcatacagtgaataaagatctatcaaaggaaaaggaaactgagaccgaaaacttagggtctaagttgttctaaacccagggttctcaaatgtgttgtacaaaaagtttcatgtaataaaattaagcaaataaaacaaatgaatagaggtcc

SEQ ID NO: 8590 - protein, 160 aa, Homo sapiens; identical to SEQ ID NO: 1220

SEQ ID NO: 8591 - DNA, 3041 bp, Homo sapiens
tgcagcctctgagcagaatattgaccagtaagagggtaaataaagtgggggcaacccctggatatgaatgttaccccctaagtctccaatattgcaggtttccctgtataacgtaaacacacttgccctcatgcctcccagaatatgaggtctaattaagaagtcccatcaggtttattttgtaaccaaagtcttttttagaggtcagacttcctaatcaaaggcctgggcctgcagtcctttcatcttaatgcaacttcctttgaaatcaaagaatattttgtctgagagctttaaggatctggtaatagacttcaaaatgttaagtgaaatttttttttcctctatttatcaatgatatatttcacttttaaaggaaattttagaggaaaattaatagctgctttttgcctaaaaaaccttgtgggtggaaacattcctctgagaatggcttttataggtattttgcctggtaatgtattcattcatgattgcccatattcttgaatgtcttcattccaatggggtcaggtcaatattatgaaaataatttttatatttatatttgtaacttaaggaatttatttctccctttactacagcatgtaaattcagctcaaattgcatgatctgaggatttaaattcacaaaacctgccactacattctggtttacattagttacttcatgctggctggggttagtgaccatttgcatactcttttaaatcaaggaggctgtagtagaagcagttttaagattcttgaaggcaaaatttgaaaaacagtgaatacttctaattgtttccttttagtgccagaactaaggacattgtgaagcacttgttagtaaacttaaccttgaaatgtcagactggaaggagtttttatagtctttgtgcatacttctaggtattacagattgggctaacgacctaaaatctatatataaagactttctgaagaactctgtattatagcaataccaaacgagtgctgtgtgtgcaaacagtctggcgttgctttttatgttgatatttatcctagaacactgaaagagaatatgccagtgataactcactttacttcagtcatttcaacacagaaaatgcttctctagcatttttcttttgtagtgttaacattttgaaattcatgtttcagaggcttcatcatcacagaatttactcttgctccatgaaaaaaaattaaataccttcagaggaatatttaagttgtaaactatgaaacttgagaaatcctcttgagataaaaggctgccaaatccagtattataaagtccatggtcatatgtgcctgtgcattaaaggaataccagatctatgcagtatacatttttcaggctgaaattcaaggggaatcattctgattattcttactacaaatggagatggctattatgaaacagcatgagcatgagccttttatcttttatacttagtgatatactttgcttgaaaatcactcagcaaagtagttcacatgatgtgtatcatatttgaagtgtggtttttctcaaaatcattgactttaaggagctcatttctgaacaaaaaggtttgctctgtggaaaaatcaatcactgccaggattctttcatttctgtactattttgtataattgaatttgttcacttctctcacaccagcaagtgttttacaggtgccttggattaaaacaaaattgattttaaaatttttatgtaagtcattgtgtctatgatgccacttttaaaaggaaaatgcaattgcgtaatggcttatatccttatttaatgtacctatttgtgttctaataattgtttgaatgttttattcagcttaaaactttaccatgaagtcataaacagtaaacaatgttttgttatgtattaaggggatatcagtgtttctcaaagtatgatccatggaccatctgggtcatggcgcctggtttcagacaacctgaatcaaatcttaggggtggggctttgggatgtcattgttcaataggcacctcaggagattctgagcacaccaatgtttgagaaccactaaaatgaggagtgggaaaaaaaaaataggtgttttgttaatttagagctgagctgagaagataatatatttttattgtcaatgacattaacagatatgcactgattcttttatacctacaatttacttaatgttccttttattaaaacgcgtggttcatgagcaactacagactgaatccagattattacctgttgctttcagtattttcgtgatggcttttaatcttatgaaatcatcttgagatcattcatggtcaagccatgaaaactcccatcttcaagcctgcctgctaaagcttctttgccttcctgattgtgattatggtaacaatttatatcagacagttgtactttttgataacttagggaaaacagaaatgacttgaacaagggattgcctgcctcactgcattgcagagatacaatttttgtaaagaacacaaatagcagttgtgaatattaaggtgtgattatctttccctgtccatgtgcttattgaaagaagatagtgaacaaatgattatattgaggatttttttaatttataagatctaatgtgaaatccacacttggaactttttagatctgtctgttgcttgtttaatatatttcttttatgacattacttaaagtttaaaagggttttctatccactgtcaatttcaattggataacattttgtcaagttttttttttcctgattatttgatgctagctggaattcaagaaatggcattgaccttattcaaataaagaaatattttagtaaatttgctttttccttcattgatcttggataataagttgccatttgtttttcagacacaacctgtattgtgatagcatttcatttatcacatgctttaggctctgcccgaggtggcctgctgcatgcagaggcagtacatggaagcatgccacgagaacatagaaatggtcatggataactgtttacccttgctggtaatgaaaaatacaaactaatt

SEQ ID NO: 8592 - protein, 56 aa, Homo sapiens
MFCYVLRGYQCFSKYDPWTIWVMAPGFRQPESNLRGGALGCHCSIGTSGDSEHTNV

SEQ ID NO: 8593 - DNA, 3198 bp, Homo sapiens
taaaataactgtttaaacattgatttgcagttaagaataaaccttaaagcaaagacaaccacattttaatttgttcacagtatgtaaatctgtctaaatttcagtgaatttctggtcagtatgatgcagcctctgagcagaatattgaccagtaagagggtaaataaagtgggggcaacccctggatatgaatgttaccccctaagtctccaatattgcaggtttccctgtataacgtaaacacacttgccctcatgcctcccagaatatgaggtctaattaagaagtcccatcaggtttattttgtaaccaaagtcttttttagaggtcagacttcctaatcaaaggcctgggcctgcagtcctttcatcttaatgcaacttcctttgaaatcaaagaatattttgtctgagagctttaaggatctggtaatagacttcaaaatgttaagtgaaatttttttttcctctatttatcaatgatatatttcacttttaaaggaaattttagaggaaaattaatagctgctttttgcctaaaaaaccttgtgggtggaaacattcctctgagaatggcttttataggtattttgcctggtaatgtattcattcatgattgcccatattcttgaatgtcttcattccaatggggtcaggtcaatattatgaaaataatttttatatttatatttgtaacttaaggaatttatttctccctttactacagcatgtaaattcagctcaaattgcatgatctgaggatttaaattcacaaaacctgccactacattctggtttacattagttacttcatgctggctggggttagtgaccatttgcatactcttttaaatcaaggaggctgtagtagaagcagttttaagattcttgaaggcaaaatttgaaaaacagtgaatattatactgatttttgctgccttcaaaatactcttttacttcttttagctaaaatggttgtctttcatttgccatagaattccaaacaatactatcttataaaatagtactgttgaattattccaagcctccctaggtttgctctcaaatgtcatttacagattgggctaacgacctaaaatctatatataaagactttctgaagaactctgtattatagcaataccaaacgagtgctgtgtgtgcaaacagtctggcgttgctttttatgttgatatttatcctagaacactgaaagagaatatgccagtgataactcactttacttcagtcatttcaacacagaaaatgcttctctagcatttttcttttgtagtgttaacattttgaaattcatgtttcagaggcttcatcatcacagaatttactcttgctccatgaaaaaaaattaaataccttcagaggaatatttaagttgtaaactatgaaacttgagaaatcctcttgagataaaaggctgccaaatccagtattataaagtccatggtcatatgtgcctgtgcattaaaggaataccagatctatgcagtatacatttttcaggctgaaattcaaggggaatcattctgattattcttactacaaatggagatggctattatgaaacagcatgagcatgagccttttatcttttatacttagtgatatactttgcttgaaaatcactcagcaaagtagttcacatgatgtgtatcatatttgaagtgtggtttttctcaaaatcattgactttaaggagctcatttctgaacaaaaaggtttgctctgtggaaaaatcaatcactgccaggattctttcatttctgtactattttgtataattgaatttgttcacttctctcacaccagcaagtgttttacaggtgccttggattaaaacaaaattgattttaaaatttttatgtaagtcattgtgtctatgatgccacttttaaaaggaaaatgcaattgcgtaatggcttatatccttatttaatgtacctatttgtgttctaataattgtttgaatgttttattcagcttaaaactttaccatgaagtcataaacagtaaacaatgttttgttatgtattaaggggatatcagtgtttctcaaagtatgatccatggaccatctgggtcatggcgcctggtttcagacaacctgaatcaaatcttaggggtggggctttgggatgtcattgttcaataggcacctcaggagattctgagcacaccaatgtttgagaaccactaaaatgaggagtgggaaaaaaaaaataggtgttttgttaatttagagctgagctgagaagataatatatttttattgtcaatgacattaacagatatgcactgattcttttatacctacaatttacttaatgttccttttattaaaacgcgtggttcatgagcaactacagactgaatccagattattacctgttgctttcagtattttcgtgatggcttttaatcttatgaaatcatcttgagatcattcatggtcaagccatgaaaactcccatcttcaagcctgcctgctaaagcttctttgccttcctgattgtgattatggtaacaatttatatcagacagttgtactttttgataacttagggaaaacagaaatgacttgaacaagggattgcctgcctcactgcattgcagagatacaatttttgtaaagaacacaaatagcagttgtgaatattaaggtgtgattatctttccctgtccatgtgcttattgaaagaagatagtgaacaaatgattatattgaggatttttttaatttataagatctaatgtgaaatccacacttggaactttttagatctgtctgttgcttgtttaatatatttcttttatgacattacttaaagtttaaaagggttttctatccactgtcaatttcaattggataacattttgtcaagttttttttttcctgattatttgatgctagctggaattcaagaaatggcattgaccttattcaaataaagaaatattttagtaaatttgctttttccttcattgatcttggataataagttgccatttgtttttcagacacaacctgtattgtgatagcatttcatttatcacatgctttaggctctgcccgaggtggcctgctgcatgcagaggcagtacatggaagcatgccacgagaacatagaaatggtcatggataactgtttacccttgctggtaatgaaaaatacaaactaatt

SEQ ID NO: 8594 - protein, 56 aa, Homo sapiens; identical to SEQ ID NO: 8592

SEQ ID NO: 8595 - DNA, 5046 bp, Homo sapiens
gccctcctccgcgttccagaatccaagatggcgggatccaggcaaaggggtctccgggccagagttcggccgctgttctgcgccttgctgctgtcactcggtcgcttcgtccggggcgacggcgtgggaggagaccccgcggtcgcgttgccacatcgccgtttcgagtacaaatacagcttcaaggggccgcacctggtgcagagcgacgggaccgtgcccttctgggcccacgcggggaatgctattccaagttcagatcaaattcgagtagcaccatctttaaaaagccaaagaggctcagtgtggacaaagacaaaagcggcctttgagaactgggaagttgaggtgacatttcgagtgactggaagaggtcgaattggagctgatggcctagcaatttggtatgcagaaaatcaaggcttggagggccctgtgtttggatcagctgatctgtggaatggtgttggaatattttttgattcttttgacaatgatggaaagaaaaataatcctgctatagtaattataggcaacaatggacaaatccattatgaccatcaaaatgacggggctagtcaagctttggcaagttgccagagggacttccgcaacaaaccctatcctgtccgagcaaagattacctattaccagaacacactgacagtaatgatcaataatggctttacaccagataaaaatgattatgaattttgtgccaaagtggaaaatatgattatccctgcacaagggcattttggaatatctgctgcaactggaggtcttgcagatgaccatgatgtcctttcttttctgactttccagttgactgaacctggaaaagagccgcccacaccagataaagaaatttcggaaaaggaaaaagaaaagtatcaggaggaatttgagcactttcaacaagaattggataaaaaaaaagaggaattccagaagggccaccccgacctccaagggcagcctgcggaggaaatatttgagagtgtaggagatcgagagctaagacaagtctttgaaggacagaatcgtattcatcttgaaatcaagcagctgaaccggcagttagatatgattcttgatgaacagagaagatatgtctcttccttaacagaggaaatctctaaaagaggagcaggaatgcctgggcagcatgggcagattactcaacaagaactggatactgttgtgaaaactcagcatgagattctgagacaagtaaatgaaatgaaaaattccatgagtgaaaccgtcagactggtcagtggaatgcagcaccctggctctgctggaggcgtctatgagacaacacagcacttcattgacatcaaagagcacctgcacatagtaaagagggacatagataacttagtgcagcgaaatatgccatcaaatgaaaagccgaaatgcccagaactaccaccatttccatcatgtttgtctacggtccacttcattatatttgttgtggtgcaaactgtattattcattggttatatcatgtataggtctcagcaagaagcagctgccaaaaaattcttttgactaccattttcctgtgtacttcatctatttgtgtacaaaatgatgtcgttttgagggaatttaagtatttaaattgcttcatagtctaaattattaattttcttaataaaataactgtttaaacattgatttgcagttaagaataaaccttaaagcaaagacaaccacattttaatttgttcacagtatgtaaatctgtctaaatttcagtgaatttctggtcagtatgatgcagcctctgagcagaatattgaccagtaagagggtaaataaagtgggggcaacccctggatatgaatgttaccccctaagtctccaatattgcaggtttccctgtataacgtaaacacacttgccctcatgcctcccagaatatgaggtctaattaagaagtcccatcaggtttattttgtaaccaaagtcttttttagaggtcagacttcctaatcaaaggcctgggcctgcagtcctttcatcttaatgcaacttcctttgaaatcaaagaatattttgtctgagagctttaaggatctggtaatagacttcaaaatgttaagtgaaatttttttttcctctatttatcaatgatatatttcacttttaaaggaaattttagaggaaaattaatagctgctttttgcctaaaaaaccttgtgggtggaaacattcctctgagaatggcttttataggtattttgcctggtaatgtattcattcatgattgcccatattcttgaatgtcttcattccaatggggtcaggtcaatattatgaaaataatttttatatttatatttgtaacttaaggaatttatttctccctttactacagcatgtaaattcagctcaaattgcatgatctgaggatttaaattcacaaaacctgccactacattctggtttacattagttacttcatgctggctggggttagtgaccatttgcatactcttttaaatcaaggaggctgtagtagaagcagttttaagattcttgaaggcaaaatttgaaaaacagtgaatacttctaattgtttccttttagtgccagaactaaggacattgtgaagcacttgttagtaaacttaaccttgaaatgtcagactggaaggagtttttatagtctttgtgcatacttctaggtattacagaaacagtctgtaaatgacattttaagatgcaaatttaattctgttcacagctgatttatactgatttttgctgccttcaaaatactcttttacttcttttagctaaaatggttgtctttcatttgccatagaattccaaacaatactatcttataaaatagtactgttgaattattccaagcctccctaggtttgctctcaaatgtcatttacagattgggctaacgacctaaaatctatatataaagactttctgaagaactctgtattatagcaataccaaacgagtgctgtgtgtgcaaacagtctggcgttgctttttatgttgatatttatcctagaacactgaaagagaatatgccagtgataactcactttacttcagtcatttcaacacagaaaatgcttctctagcatttttcttttgtagtgttaacattttgaaattcatgtttcagaggcttcatcatcacagaatttactcttgctccatgaaaaaaaattaaataccttcagaggaatatttaagttgtaaactatgaaacttgagaaatcctcttgagataaaaggctgccaaatccagtattataaagtccatggtcatatgtgcctgtgcattaaaggaataccagatctatgcagtatacatttttcaggctgaaattcaaggggaatcattctgattattcttactacaaatggagatggctattatgaaacagcatgagcatgagccttttatcttttatacttagtgatatactttgcttgaaaatcactcagcaaagtagttcacatgatgtgtatcatatttgaagtgtggtttttctcaaaatcattgactttaaggagctcatttctgaacaaaaaggtttgctctgtggaaaaatcaatcactgccaggattctttcatttctgtactattttgtataattgaatttgttcacttctctcacaccagcaagtgttttacaggtgccttggattaaaacaaaattgattttaaaatttttatgtaagtcattgtgtctatgatgccacttttaaaaggaaaatgcaattgcgtaatggcttatatccttatttaatgtacctatttgtgttctaataattgtttgaatgttttattcagcttaaaactttaccatgaagtcataaacagtaaacaatgttttgttatgtattaaggggatatcagtgtttctcaaagtatgatccatggaccatctgggtcatggcgcctggtttcagacaacctgaatcaaatcttaggggtggggctttgggatgtcattgttcaataggcacctcaggagattctgagcacaccaatgtttgagaaccactaaaatgaggagtgggaaaaaaaaaataggtgttttgttaatttagagctgagctgagaagataatatatttttattgtcaatgacattaacagatatgcactgattcttttatacctacaatttacttaatgttccttttattaaaacgcgtggttcatgagcaactacagactgaatccagattattacctgttgctttcagtattttcgtgatggcttttaatcttatgaaatcatcttgagatcattcatggtcaagccatgaaaactcccatcttcaagcctgcctgctaaagcttctttgccttcctgattgtgattatggtaacaatttatatcagacagttgtactttttgataacttagggaaaacagaaatgacttgaacaagggattgcctgcctcactgcattgcagagatacaatttttgtaaagaacacaaatagcagttgtgaatattaaggtgtgattatctttccctgtccatgtgcttattgaaagaagatagtgaacaaatgattatattgaggatttttttaatttataagatctaatgtgaaatccacacttggaactttttagatctgtctgttgcttgtttaatatatttcttttatgacattacttaaagtttaaaagggttttctatccactgtcaatttcaattggataacattttgtcaagttttttttttcctgattatttgatgctagctggaattcaagaaatggcattgaccttattcaaataaagaaatattttagtaaatttgctttttccttcattgatcttggataataagttgccatttgtttttcagacacaacctgtattgtgatagcatttcatttatcacatgctttaggctctgcccgaggtggcctgctgcatgcagaggcagtacatggaagcatgccacgagaacatagaaatggtcatggataactgtttacccttgctggtaatgaaaaatacaaactaatt

SEQ ID NO: 8596 - protein, 510 aa, Homo sapiens; identical to SEQ ID NO: 1222

SEQ ID NO: 8597 - DNA, 2822 bp, Homo sapiens
tgcagcctctgagcagaatattgaccagtaagagggtaaataaagtgggggcaacccctggatatgaatgttaccccctaagtctccaatattgcaggtttccctgtataacgtaaacacacttgccctcatgcctcccagaatatgaggtctaattaagaagtcccatcaggtttattttgtaaccaaagtcttttttagaggtcagacttcctaatcaaaggcctgggcctgcagtcctttcatcttaatgcaacttcctttgaaatcaaagaatattttgtctgagagctttaaggatctggtaatagacttcaaaatgttaagtgaaatttttttttcctctatttatcaatgatatatttcacttttaaaggaaattttagaggaaaattaatagctgctttttgcctaaaaaaccttgtgggtggaaacattcctctgagaatggcttttataggtattttgcctggtaatgtattcattcatgattgcccatattcttgaatgtcttcattccaatggggtcaggtcaatattatgaaaataatttttatatttatatttgtaacttaaggaatttatttctccctttactacagcatgtaaattcagctcaaattgcatgatctgaggatttaaattcacaaaacctgccactacattctggtttacattagttacttcatgctggctggggttagtgaccatttgcatactcttttaaatcaaggaggctgtagtagaagcagttttaagattcttgaaggcaaaatttgaaaaacagtgaatacttctaattgtttccttttagtgccagaactaaggacattgtgaagcacttgttagtaaacttaaccttgaaatgtcagactggaaggagtttttatagtctttgtgcatacttctaggtattacagattgggctaacgacctaaaatctatatataaagactttctgaagaactctgtattatagcaataccaaacgagtgctgtgtgtgcaaacagtctggcgttgctttttatgttgatatttatcctagaacactgaaagagaatatgccagtgataactcactttacttcagtcatttcaacacagaaaatgcttctctagcatttttcttttgtagtgttaacattttgaaattcatgtttcagaggcttcatcatcacagaatttactcttgctccatgaaaaaaaattaaataccttcagaggaatatttaagttgtaaactatgaaacttgagaaatcctcttgagataaaaggctgccaaatccagtattataaagtccatggtcatatgtgcctgtgcattaaaggaataccagatctatgcagtatacatttttcaggctgaaattcaaggggaatcattctgattattcttactacaaatggagatggctattatgaaacagcatgagcatgagccttttatcttttatacttagtgatatactttgcttgaaaatcactcagcaaagtagttcacatgatgtgtatcatatttgaagtgtggtttttctcaaaatcattgactttaaggagctcatttctgaacaaaaaggtttgctctgtggaaaaatcaatcactgccaggattctttcatttctgtactattttgtataattgaatttgttcacttctctcacaccagcaagtgttttacaggtgccttggattaaaacaaaattgattttaaaatttttatgtaagtcattgtgtctatgatgccacttttaaaaggaaaatgcaattgcgtaatggcttatatccttatttaatgtacctatttgtgttctaataattgtttgaatgttttattcagcttaaaactttaccatgaagtcataaacagtaaacaatgttttgttatgtattaaggggatatcagtgtttctcaaagtatgatccatggaccatctgggtcatggcgcctggtttcagacaacctgaatcaaatcttaggggtggggctttgggatgtcattgttcaataggcacctcaggagattctgagcacaccaatgtttgagaaccactaaaatgaggagtgggaaaaaaaaaataggtgttttgttaatttagagctgagctgagaagataatatatttttattgtcaatgacattaacagatatgcactgattcttttatacctacaatttacttaatgttccttttattaaaacgcgtggttcatgagcaactacagactgaatccagattattacctgttgctttcagtattttcgtgatggcttttaatcttatgaaatcatcttgagatcattcatggtcaagccatgaaaactcccatcttcaagcctgcctgctaaagcttctttgccttcctgattgtgattatggtaacaatttatatcagacagttgtactttttgataacttagggaaaacagaaatgacttgaacaagggattgcctgcctcactgcattgcagagatacaatttttgtaaagaacacaaatagcagttgtgaatattaaggtgtgattatctttccctgtccatgtgcttattgaaagaagatagtgaacaaatgattatattgaggatttttttaatttataagatctaatgtgaaatccacacttggaactttttagatctgtctgttgcttgtttaatatatttcttttatgacattacttaaagtttaaaagggttttctatccactgtcaatttcaattggataacattttgtcaagttttttttttcctgattatttgatgctagctggaattcaagaaatggcattgaccttattcaaataaagaaatattttagt

SEQ ID NO: 8598 - protein, 56 aa, Homo sapiens; identical to SEQ ID NO: 8592

SEQ ID NO: 8599 - DNA, 2979 bp, Homo sapiens
taaaataactgtttaaacattgatttgcagttaagaataaaccttaaagcaaagacaaccacattttaatttgttcacagtatgtaaatctgtctaaatttcagtgaatttctggtcagtatgatgcagcctctgagcagaatattgaccagtaagagggtaaataaagtgggggcaacccctggatatgaatgttaccccctaagtctccaatattgcaggtttccctgtataacgtaaacacacttgccctcatgcctcccagaatatgaggtctaattaagaagtcccatcaggtttattttgtaaccaaagtcttttttagaggtcagacttcctaatcaaaggcctgggcctgcagtcctttcatcttaatgcaacttcctttgaaatcaaagaatattttgtctgagagctttaaggatctggtaatagacttcaaaatgttaagtgaaatttttttttcctctatttatcaatgatatatttcacttttaaaggaaattttagaggaaaattaatagctgctttttgcctaaaaaaccttgtgggtggaaacattcctctgagaatggcttttataggtattttgcctggtaatgtattcattcatgattgcccatattcttgaatgtcttcattccaatggggtcaggtcaatattatgaaaataatttttatatttatatttgtaacttaaggaatttatttctccctttactacagcatgtaaattcagctcaaattgcatgatctgaggatttaaattcacaaaacctgccactacattctggtttacattagttacttcatgctggctggggttagtgaccatttgcatactcttttaaatcaaggaggctgtagtagaagcagttttaagattcttgaaggcaaaatttgaaaaacagtgaatattatactgatttttgctgccttcaaaatactcttttacttcttttagctaaaatggttgtctttcatttgccatagaattccaaacaatactatcttataaaatagtactgttgaattattccaagcctccctaggtttgctctcaaatgtcatttacagattgggctaacgacctaaaatctatatataaagactttctgaagaactctgtattatagcaataccaaacgagtgctgtgtgtgcaaacagtctggcgttgctttttatgttgatatttatcctagaacactgaaagagaatatgccagtgataactcactttacttcagtcatttcaacacagaaaatgcttctctagcatttttcttttgtagtgttaacattttgaaattcatgtttcagaggcttcatcatcacagaatttactcttgctccatgaaaaaaaattaaataccttcagaggaatatttaagttgtaaactatgaaacttgagaaatcctcttgagataaaaggctgccaaatccagtattataaagtccatggtcatatgtgcctgtgcattaaaggaataccagatctatgcagtatacatttttcaggctgaaattcaaggggaatcattctgattattcttactacaaatggagatggctattatgaaacagcatgagcatgagccttttatcttttatacttagtgatatactttgcttgaaaatcactcagcaaagtagttcacatgatgtgtatcatatttgaagtgtggtttttctcaaaatcattgactttaaggagctcatttctgaacaaaaaggtttgctctgtggaaaaatcaatcactgccaggattctttcatttctgtactattttgtataattgaatttgttcacttctctcacaccagcaagtgttttacaggtgccttggattaaaacaaaattgattttaaaatttttatgtaagtcattgtgtctatgatgccacttttaaaaggaaaatgcaattgcgtaatggcttatatccttatttaatgtacctatttgtgttctaataattgtttgaatgttttattcagcttaaaactttaccatgaagtcataaacagtaaacaatgttttgttatgtattaaggggatatcagtgtttctcaaagtatgatccatggaccatctgggtcatggcgcctggtttcagacaacctgaatcaaatcttaggggtggggctttgggatgtcattgttcaataggcacctcaggagattctgagcacaccaatgtttgagaaccactaaaatgaggagtgggaaaaaaaaaataggtgttttgttaatttagagctgagctgagaagataatatatttttattgtcaatgacattaacagatatgcactgattcttttatacctacaatttacttaatgttccttttattaaaacgcgtggttcatgagcaactacagactgaatccagattattacctgttgctttcagtattttcgtgatggcttttaatcttatgaaatcatcttgagatcattcatggtcaagccatgaaaactcccatcttcaagcctgcctgctaaagcttctttgccttcctgattgtgattatggtaacaatttatatcagacagttgtactttttgataacttagggaaaacagaaatgacttgaacaagggattgcctgcctcactgcattgcagagatacaatttttgtaaagaacacaaatagcagttgtgaatattaaggtgtgattatctttccctgtccatgtgcttattgaaagaagatagtgaacaaatgattatattgaggatttttttaatttataagatctaatgtgaaatccacacttggaactttttagatctgtctgttgcttgtttaatatatttcttttatgacattacttaaagtttaaaagggttttctatccactgtcaatttcaattggataacattttgtcaagttttttttttcctgattatttgatgctagctggaattcaagaaatggcattgaccttattcaaataaagaaatattttagt

SEQ ID NO: 8600 - protein, 56 aa, Homo sapiens; identical to SEQ ID NO: 8592

SEQ ID NO: 8601 - DNA, 4827 bp, Homo sapiens
gccctcctccgcgttccagaatccaagatggcgggatccaggcaaaggggtctccgggccagagttcggccgctgttctgcgccttgctgctgtcactcggtcgcttcgtccggggcgacggcgtgggaggagaccccgcggtcgcgttgccacatcgccgtttcgagtacaaatacagcttcaaggggccgcacctggtgcagagcgacgggaccgtgcccttctgggcccacgcggggaatgctattccaagttcagatcaaattcgagtagcaccatctttaaaaagccaaagaggctcagtgtggacaaagacaaaagcggcctttgagaactgggaagttgaggtgacatttcgagtgactggaagaggtcgaattggagctgatggcctagcaatttggtatgcagaaaatcaaggcttggagggccctgtgtttggatcagctgatctgtggaatggtgttggaatattttttgattcttttgacaatgatggaaagaaaaataatcctgctatagtaattataggcaacaatggacaaatccattatgaccatcaaaatgacggggctagtcaagctttggcaagttgccagagggacttccgcaacaaaccctatcctgtccgagcaaagattacctattaccagaacacactgacagtaatgatcaataatggctttacaccagataaaaatgattatgaattttgtgccaaagtggaaaatatgattatccctgcacaagggcattttggaatatctgctgcaactggaggtcttgcagatgaccatgatgtcctttcttttctgactttccagttgactgaacctggaaaagagccgcccacaccagataaagaaatttcggaaaaggaaaaagaaaagtatcaggaggaatttgagcactttcaacaagaattggataaaaaaaaagaggaattccagaagggccaccccgacctccaagggcagcctgcggaggaaatatttgagagtgtaggagatcgagagctaagacaagtctttgaaggacagaatcgtattcatcttgaaatcaagcagctgaaccggcagttagatatgattcttgatgaacagagaagatatgtctcttccttaacagaggaaatctctaaaagaggagcaggaatgcctgggcagcatgggcagattactcaacaagaactggatactgttgtgaaaactcagcatgagattctgagacaagtaaatgaaatgaaaaattccatgagtgaaaccgtcagactggtcagtggaatgcagcaccctggctctgctggaggcgtctatgagacaacacagcacttcattgacatcaaagagcacctgcacatagtaaagagggacatagataacttagtgcagcgaaatatgccatcaaatgaaaagccgaaatgcccagaactaccaccatttccatcatgtttgtctacggtccacttcattatatttgttgtggtgcaaactgtattattcattggttatatcatgtataggtctcagcaagaagcagctgccaaaaaattcttttgactaccattttcctgtgtacttcatctatttgtgtacaaaatgatgtcgttttgagggaatttaagtatttaaattgcttcatagtctaaattattaattttcttaataaaataactgtttaaacattgatttgcagttaagaataaaccttaaagcaaagacaaccacattttaatttgttcacagtatgtaaatctgtctaaatttcagtgaatttctggtcagtatgatgcagcctctgagcagaatattgaccagtaagagggtaaataaagtgggggcaacccctggatatgaatgttaccccctaagtctccaatattgcaggtttccctgtataacgtaaacacacttgccctcatgcctcccagaatatgaggtctaattaagaagtcccatcaggtttattttgtaaccaaagtcttttttagaggtcagacttcctaatcaaaggcctgggcctgcagtcctttcatcttaatgcaacttcctttgaaatcaaagaatattttgtctgagagctttaaggatctggtaatagacttcaaaatgttaagtgaaatttttttttcctctatttatcaatgatatatttcacttttaaaggaaattttagaggaaaattaatagctgctttttgcctaaaaaaccttgtgggtggaaacattcctctgagaatggcttttataggtattttgcctggtaatgtattcattcatgattgcccatattcttgaatgtcttcattccaatggggtcaggtcaatattatgaaaataatttttatatttatatttgtaacttaaggaatttatttctccctttactacagcatgtaaattcagctcaaattgcatgatctgaggatttaaattcacaaaacctgccactacattctggtttacattagttacttcatgctggctggggttagtgaccatttgcatactcttttaaatcaaggaggctgtagtagaagcagttttaagattcttgaaggcaaaatttgaaaaacagtgaatacttctaattgtttccttttagtgccagaactaaggacattgtgaagcacttgttagtaaacttaaccttgaaatgtcagactggaaggagtttttatagtctttgtgcatacttctaggtattacagaaacagtctgtaaatgacattttaagatgcaaatttaattctgttcacagctgatttatactgatttttgctgccttcaaaatactcttttacttcttttagctaaaatggttgtctttcatttgccatagaattccaaacaatactatcttataaaatagtactgttgaattattccaagcctccctaggtttgctctcaaatgtcatttacagattgggctaacgacctaaaatctatatataaagactttctgaagaactctgtattatagcaataccaaacgagtgctgtgtgtgcaaacagtctggcgttgctttttatgttgatatttatcctagaacactgaaagagaatatgccagtgataactcactttacttcagtcatttcaacacagaaaatgcttctctagcatttttcttttgtagtgttaacattttgaaattcatgtttcagaggcttcatcatcacagaatttactcttgctccatgaaaaaaaattaaataccttcagaggaatatttaagttgtaaactatgaaacttgagaaatcctcttgagataaaaggctgccaaatccagtattataaagtccatggtcatatgtgcctgtgcattaaaggaataccagatctatgcagtatacatttttcaggctgaaattcaaggggaatcattctgattattcttactacaaatggagatggctattatgaaacagcatgagcatgagccttttatcttttatacttagtgatatactttgcttgaaaatcactcagcaaagtagttcacatgatgtgtatcatatttgaagtgtggtttttctcaaaatcattgactttaaggagctcatttctgaacaaaaaggtttgctctgtggaaaaatcaatcactgccaggattctttcatttctgtactattttgtataattgaatttgttcacttctctcacaccagcaagtgttttacaggtgccttggattaaaacaaaattgattttaaaatttttatgtaagtcattgtgtctatgatgccacttttaaaaggaaaatgcaattgcgtaatggcttatatccttatttaatgtacctatttgtgttctaataattgtttgaatgttttattcagcttaaaactttaccatgaagtcataaacagtaaacaatgttttgttatgtattaaggggatatcagtgtttctcaaagtatgatccatggaccatctgggtcatggcgcctggtttcagacaacctgaatcaaatcttaggggtggggctttgggatgtcattgttcaataggcacctcaggagattctgagcacaccaatgtttgagaaccactaaaatgaggagtgggaaaaaaaaaataggtgttttgttaatttagagctgagctgagaagataatatatttttattgtcaatgacattaacagatatgcactgattcttttatacctacaatttacttaatgttccttttattaaaacgcgtggttcatgagcaactacagactgaatccagattattacctgttgctttcagtattttcgtgatggcttttaatcttatgaaatcatcttgagatcattcatggtcaagccatgaaaactcccatcttcaagcctgcctgctaaagcttctttgccttcctgattgtgattatggtaacaatttatatcagacagttgtactttttgataacttagggaaaacagaaatgacttgaacaagggattgcctgcctcactgcattgcagagatacaatttttgtaaagaacacaaatagcagttgtgaatattaaggtgtgattatctttccctgtccatgtgcttattgaaagaagatagtgaacaaatgattatattgaggatttttttaatttataagatctaatgtgaaatccacacttggaactttttagatctgtctgttgcttgtttaatatatttcttttatgacattacttaaagtttaaaagggttttctatccactgtcaatttcaattggataacattttgtcaagttttttttttcctgattatttgatgctagctggaattcaagaaatggcattgaccttattcaaataaagaaatattttagt

SEQ ID NO: 8602 - protein, 510 aa, Homo sapiens; identical to SEQ ID NO: 1222

SEQ ID NO: 8603 - DNA, 1728 bp, Homo sapiens
gccctcctccgcgttccagaatccaagatggcgggatccaggcaaaggggtctccgggccagagttcggccgctgttctgcgccttgctgctgtcactcggtcgcttcgtccggggcgacggcgtgggaggagaccccgcggtcgcgttgccacatcgccgtttcgagtacaaatacagcttcaaggggccgcacctggtgcagagcgacgggaccgtgcccttctgggcccacgcggggaatgctattccaagttcagatcaaattcgagtagcaccatctttaaaaagccaaagaggctcagtgtggacaaagacaaaagcggcctttgagaactgggaagttgaggtgacatttcgagtgactggaagaggtcgaattggagctgatggcctagcaatttggtatgcagaaaatcaaggcttggagggccctgtgtttggatcagctgatctgtggaatggtgttggaatattttttgattcttttgacaatgatggaaagaaaaataatcctgctatagtaattataggcaacaatggacaaatccattatgaccatcaaaatgacggggctagtcaagctttggcaagttgccagagggacttccgcaacaaaccctatcctgtccgagcaaagattacctattaccagaacacactgacagtaatgatcaataatggctttacaccagataaaaatgattatgaattttgtgccaaagtggaaaatatgattatccctgcacaagggcattttggaatatctgctgcaactggaggtcttgcagatgaccatgatgtcctttcttttctgactttccagttgactgaacctggaaaagagccgcccacaccagataaagaaatttcggaaaaggaaaaagaaaagtatcaggaggaatttgagcactttcaacaagaattggataaaaaaaaagaggaattccagaagggccaccccgacctccaagggcagcctgcggaggaaatatttgagagtgtaggagatcgagagctaagacaagtctttgaaggacagaatcgtattcatcttgaaatcaagcagctgaaccggcagttagatatgattcttgatgaacagagaagatatgtctcttccttaacagaggaaatctctaaaagaggagcaggaatgcctgggcagcatgggcagattactcaacaagaactggatactgttgtgaaaactcagcatgagattctgagacaagtaaatgaaatgaaaaattccatgagtgaaaccgtcagactggtcagtggaatgcagcaccctggctctgctggaggcgtctatgagacaacacagcacttcattgacatcaaagagcacctgcacatagtaaagagggacatagataacttagtgcagcgaaatatgccatcaaatgaaaagccgaaatgcccagaactaccaccatttccatcatgtttgtctacggtccacttcattatatttgttgtggtgcaaactgtattattcattggttatatcatgtataggtctcagcaagaagcagctgccaaaaaattcttttgactaccattttcctgtgtacttcatctatttgtgtacaaaatgatgtcgttttgagggaatttaagtatttaaattgcttcatagtctaaattattaattttcttaataaaataactgtttaaacattgatttgcagttaagaataaaccttaaagcaaagacaaccac

SEQ ID NO: 8604 - protein, 510 aa, Homo sapiens; identical to SEQ ID NO: 1222

SEQ ID NO: 8605 - DNA, 930 bp, Homo sapiens
gccctcctccgcgttccagaatccaagatggcgggatccaggcaaaggggtctccgggccagagttcggccgctgttctgcgccttgctgctgtcactcggtcgcttcgtccggggcgacggcgtgggaggagaccccgcggtcgcgttgccacatcgccgtttcgagtacaaatacagcttcaaggggccgcacctggtgcagagcgacgggaccgtgcccttctgggcccacgcggggaatgctattccaagttcagatcaaattcgagtagcaccatctttaaaaagccaaagaggctcagtgtggacaaagacaaaagcggcctttgagaactgggaagttgaggtgacatttcgagtgactggaagaggtcgaattggagctgatggcctagcaatttggtatgcagaaaatcaaggcttggagggccctgtgtttggatcagctgatctgtggaatggtgttggaatattttttgattcttttgacaatgatggaaagaaaaataatcctgctatagtaattataggcaacaatggacaaatccattatgaccatcaaaatgacggggctagtcaagctttggcaagttgccagagggacttccgcaacaaaccctatcctgtccgagcaaagattacctattaccagaacacactgacagtaatgatcaataatggctttacaccagataaaaatgattatgaattttgtgccaaagtggaaaatatgattatccctgcacaagggcattttggaatatctgctgcaactggaggtcttgcagatgaccatgatgtcctttcttttctgactttccagttgactgaacctggaaaagagccgcccacaccagataaagaaatttcggaaaaggaaaaagaaaagtatcaggaggaatttgagcactttcaacaagaattggat

SEQ ID NO: 8606 - protein, 300 aa, Homo sapiens
MAGSRQRGLRARVRPLFCALLLSLGRFVRGDGVGGDPAVALPHRRFEYKYSFKGPHLVQSDGTVPFWAHAGNAIPSSDQIRVAPSLKSQRGSVWTKTKAAFENWEVEVTFRVTGRGRIGADGLAIWYAENQGLEGPVFGSADLWNGVGIFFDSFDNDGKKNNPAIVIIGNNGQIHYDHQNDGASQALASCQRDFRNKPYPVRAKITYYQNTLTVMINNGFTPDKNDYEFCAKVENMIIPAQGHFGISAATGGLADDHDVLSFLTFQLTEPGKEPPTPDKEISEKEKEKYQEEFEHFQQEL

SEQ ID NO: 8607 - DNA, 415 bp, Homo sapiens
catatgttaacttattgaatgctgacagcagccctctaaggtagatgccattaatatttccatttacagatgaggaaacagaagcatagattaaataatttgcccaatgtcacacagtaagtggcagagttcatatcccttgaagacatgaccaccacgcttcactccccgcctgtgacacagaggaagctctgagatgaagagtcctctccgccaccagaagcagcagcgaaaacccatccaaagggttcaagaaaaactttcattctgagaagaggaacagggtcggggaggcacgccggactccacatcatttcttccttcaattttgaaggagagtcgagggctggaccatcaaggctttagtctgaattcaggcctaatgtgagaattaaagaacagaaaccgccagact

SEQ ID NO: 8608 - protein, 56 aa, Homo sapiens
DEESSPPPEAAAKTHPKGSRKTFILRRGTGSGRHAGLHIISSFNFEGESRAGPSRL

SEQ ID NO: 8609 - DNA, 762 bp, Homo sapiens
tcgcgcggccgagaggctgcagcggcagcagctgtcgcgccagtcgcaacagaagcaggtccgaggcacagcccgatcccgccatggagcagccgaggaaggcggtggtagtgacgggatttggcccttttggggaacacaccgtgaacgccagttggattgcagttcaggagctagaaaagctaggccttggcgacagcgtggacctgcatgtgtacgagattccggttgagtaccaaacagtccagagactcatccccgccctgtgggagaagcacagtccacagctggtggtgcatgtgggggtgtcaggcatggcgaccacagtcacactggagaaatgtggacacaacaagggctacaaggggctggacaactgccgcttttgccccggctcccagtgctgcgtggaggacgggcctgaaagcattgactccatcatcgacatggatgctgtgtgcaagcgagtcaccacgttgggcctggatgtgtcggtgaccatctcgcaggatgccggcaggtagggccctgtggggtgggagtgagtggggatttccctcctccacccactgagcctggtgtagaacaagccaagcgtgttgaccttggcctctttggaccaagcactcagtgtatactaggcacagagccaagtatttgtacgtagcaggtgccgttggttctgctcctgggactcatggatctgcccacttctccccaccatcacggtccccaccaaggcccccagcatctcccacctgg

SEQ ID NO: 8610 - protein, 146 aa, Homo sapiens
MEQPRKAVVVTGFGPFGEHTVNASWIAVQELEKLGLGDSVDLHVYEIPVEYQTVQRLIPALWEKHSPQLVVHVGVSGMATTVTLEKCGHNKGYKGLDNCRFCPGSQCCVEDGPESIDSIIDMDAVCKRVTTLGLDVSVTISQDAGR

SEQ ID NO: 8611 - DNA, 1233 bp, Homo sapiens
gaggctgcagcggcagcagctgtcgcgccagtcgcaacagaagcaggtccgaggcacagcccgatcccgccatggagcagccgaggaaggcggtggtagtgacgggatttggcccttttggggaacacaccgtgaacgccagttggattgcagttcagagatgggatctcactatattgccctggctggtcttgaacttccgggctcaaatgatccttccacctcggcctcccaaagaagctgggattataggtgtgagccaccgagccctgccatcaggagctagaaaagctaggccttggcgacagcgtggacctgcatgtgtacgagattccggttgagtaccaaacagtccagagactcatccccgccctgtgggagaagcacagtccacagctggtggtgcatgtgggggtgtcaggcatggcgaccacagtcacactggagaaatgtggacacaacaagggctacaaggggctggacaactgccgcttttgccccggctcccagtgctgcgtggaggacgggcctgaaagcattgactccatcatcgacatggatgctgtgtgcaagcgagtcaccacgttgggcctggatgtgtcggtgaccatctcgcaggatgccggcagatatctctgcgactttacctactacacctctttgtaccagagtcacggtcgatcagccttcgtccacgtgcccccactggggaagccgtacaacgcggaccagctgggcagggcactgagagccatcattgaggagatgttggacctcctggagcagtcagagggcaaaatcaactattgccacaaacactgagggacgctcaggtctcctaagacctcatcctgctggggaccccacgaggggacatccaccctctggggtgtggccaggaaaagacaagctcttcagcttggggatccgatctggaagagagattctgatctgcccacctcctcttcctccttctctacaaaagctccggttgattcgagggaagtggtgaaaatttttttttctcccattttcctccctgcatctggggacacagctgccgtgaccagggaggccagcctgggaggtccagatgcccagggagaatcttggtctggtgaatccatgagctgcgataccacggctggggccatatgttcacctgctttcctgtccgttggtgaaggaatttcagaattcattttatatccaagactggcttttaccaaattt

SEQ ID NO: 8612 - protein, 132 aa, Homo sapiens
MATTVTLEKCGHNKGYKGLDNCRFCPGSQCCVEDGPESIDSIIDMDAVCKRVTTLGLDVSVTISQDAGRYLCDFTYYTSLYQSHGRSAFVHVPPLGKPYNADQLGRALRAIIEEMLDLLEQSEGKINYCHKH

SEQ ID NO: 8613 - DNA, 1410 bp, Homo sapiens
gctgcagcggcagcagctgtcgcgccagtcgcaacagaagcaggtccgaggcacagcccgatcccgccatggagcagccgaggaaggcggtggtagtgacgggatttggcccttttggggaacacaccgtgaacgccagttggattgcagttcagagatgggatctcactatattgccctggctggtcttgaacttccgggctcaaatgatccttccacctcggcctcccaaagaagctgggattataggtgtgagccaccgagccctgccatcaggagctagaaaagctaggccttggcgacagcgtggacctgcatgtgtacgagattccggttgagtaccaaacagtccagagactcatccccgccctgtgggagaagcacagtccacagctggtggtgcatgtgggggtgtcaggcatggcgaccacagtcacactggagaaatgtggacacaacaagggctacaaggggctggacaactgccgcttttgccccggctcccagtgctgcgtggaggacgggcctgaaagcattgactccatcatcgacatggatgctgtgtgcaagcgagtcaccacgttgggcctggatgtgtcggtgaccatctcgcaggatgccggcagagtcacggtcgatcagccttcgtccacgtgcccccactggggaagccgtacaacgcggaccagctgggcagggcactgagagccatcattgaggagatgttggacctcctggagcagtcagagggcaaaatcaactattgccacaaacactgagggacgctcaggtctcctaagacctcatcctgctggggaccccacgaggggacatccaccctctggggtgtggccaggaaaagacaagctcttcagcttggggatccgatctggaagagagattctgatctgcccacctcctcttcctccttctctacaaaagctccggttgattcgagggaagtggtgaaaatttttttttctcccattttcctccctgcatctggggacacagctgccgtgaccagggaggccagcctgggaggtccagatgcccagggagaatcttggtctggtgaatccatgagctgcgataccacggctggggccatatgttcacctgctttcctgtccgttggtgaaggaatttcagaattcattttatatccaagactggcttttaccaaatttaaaagcctctcaatgcgtcctcgaccttgaactgtgctcaacagcctggccctttctggggccaccctgggatatggctggctggctggctttctttctttctttctttctttctttcttgctttctttctttcttgctttctttcttctctctctctctttttttttttttttaaatagtgctagtttgggcacagagtaatttatattccctttggtt

SEQ ID NO: 8614 - protein, 95 aa, Homo sapiens
MCTRFRLSTKQSRDSSPPCGRSTVHSWWCMWGCQAWRPQSHWRNVDTTRATRGWTTAAFAPAPSAAWRTGLKALTPSSTWMLCASESPRWAWMCR

SEQ ID NO: 8615 - DNA, 2162 bp, Homo sapiens
agtcgcaacagaagcaggtccgaggcacagcccgatcccgccatggagcagccgaggaaggcggtggtagtgacgggatttggcccttttggggaacacaccgtgaacgccagttggattgcagttcaggagctagaaaagctaggccttggcgacagcgtggacctgcatgtgtacgagattccggttgagtaccaaacagtccagagactcatccccgccctgtgggagaagcacagtccacagctggtggtgcatgtgggggtgtcaggcatggcgaccacagtcacactggagaaatgtggacacaacaagggctacaaggggctggacaactgccgcttttgccccggctcccagtgctgcgtggaggacgggcctgaaagcattgactccatcatcgacatggatgctgtgtgcaagcgagtcaccacgttgggcctggatgtgtcggtgaccatctcgcaggatgccggcagatatctctgcgactttacctactacacctctttgtaccagagtcacggtcgatcagccttcgtccacgtgcccccactggggaagccgtacaacgcggaccagctgggcagggcactgagagccatcattgaggagatgttggacctcctggagcagtcagagggcaaaatcaactattgccacaaacactgagggacgctcaggtctcctaagacctcatcctgctggggaccccacgaggggacatccaccctctggggtgtggccaggaaaagacaagctcttcagcttggggatccgatctggaagagagattctgatctgcccacctcctcttcctccttctctacaaaagctccggttgattcgagggaagtggtgaaaatttttttttctcccattttcctccctgcatctggggacacagctgccgtgaccagggaggccagcctgggaggtccagatgcccagggagaatcttggtctggtgaatccatgagctgcgataccacggctggggccatatgttcacctgctttcctgtccgttggtgaaggaatttcagaattcattttatatccaagactggcttttaccaaatttaaaagcctctcaatgcgtcctcgaccttgaactgtgctcaacagcctggccctttctggggccaccctgggatatggctggctggctggctttctttctttctttctttctttctttcttgctttctttctttcttgctttctttcttctctctctctctttttttttttttttaaatagtgctagtttgggcacagagtaatttatattccctttggttaaaatgcaggctttttagccaacaacaaaagtgttttccccccacccccactcgcccaccagggtgatgccacttttgcctcctgccctgaaaaaattggacttaagatggcatgtcttttgctgggattacaggcatgagccactgcacccagcccagttctttcttaaaacagctgagagttttgttttcttcagcgttcaccttccttgtctccagttccgatgctggcagtggttcctacctctgttgggtttctagatagtttgggaacggggttgatgggtttctgtgaaacacattttccaagtcttgggctttctctggaggggaaggtggatgctggcgggtgacttgcagtgggcgcctggcagtgggtgtggactgtaactgacaggtggaaatgagtagggacactattgttccctccatgccagcttttttttttgctggaaatgccccctccacacccctggtagctctgtgtcctgagaaatccagagtgtgggagacatcactgcatctgtccccccagcttctgtgaagggaagctgtggcctcttttgaatgtggggaacaactgaagactcaggggtcacccagaggtctggtggaaagcaacttcaggtttcatcttgctctattcctcaaaggtctggtctgtgggcctctgaggagaaaacaggtctagccaagacagggacaaaatggggaaggggatgtgccaggcctgaactgagctaagcacctgccccgggctccacacttccatctttcttttgtcttcatttcacctctgtgtttaaagcactgtgtgacatagctccttagagatataacctattgtctgctcattgtc

SEQ ID NO: 8616 - protein, 209 aa, Homo sapiens; identical to SEQ ID NO: 1224

SEQ ID NO: 8617 - DNA, 706 bp, Homo sapiens
ccgaggcacagcccgatcccgccatggagcagccgaggaaggcggtggtagtgacgggatttggcccttttggggaacacaccgtgaacgccagttggattgcagttcaggagctagaaaagctaggccttggcgacagcgtggacctgcatgtgtacgagattccggttgagtaccaaacagtccagagactcatccccgccctgtgggagaagcacagtccacagctggtggtgcatgtgggggtgtcaggcatggcgaccacagtcacactggagaaatgtggacacaacaagggctacaaggggctggacaactgccgcttttgccccggctcccagtgctgcgtggaggacgggcctgaaagcattgactccatcatcgacatggatgctgtgtgcaagcgagtcaccacgttgggcctggatgtgtcggtgaccatctcgcaggatgccggcaggaaaaaacccttccctgccaaaggtgactgtgttttctgccgccgaaggagggcccggtccctccaggctcagtgtggcttctccctgacccccgccctagaacttttgccagtgccttttctgaaactcctgtgtcccgggccccccaggcggagaaggatatgccggattctgcctggggctgggctctaggagaccccaaatttgacaccacagaaagcaaataaaacacttgaaatacgcat

SEQ ID NO: 8618 - protein, 209 aa, Homo sapiens
MEQPRKAVVVTGFGPFGEHTVNASWIAVQELEKLGLGDSVDLHVYEIPVEYQTVQRLIPALWEKHSPQLVVHVGVSGMATTVTLEKCGHNKGYKGLDNCRFCPGSQCCVEDGPESIDSIIDMDAVCKRVTTLGLDVSVTISQDAGRKKPFPAKGDCVFCRRRRARSLQAQCGFSLTPALELLPVPFLKLLCPGPPRRRRICRILPGAGL

SEQ ID NO: 8619 - DNA, 366 bp, Homo sapiens
caggagctagaaaagctaggccttggcgacagcgtggacctgcatgtgtacgagattccggttgagtaccaaacagtccagagactcatccccgccctgtgggagaagcacagtccacaggaaaaaacccttccctgccaaaggtgactgtgttttctgccgccgaaggagggcccggtccctccaggctcagtgtggcttctccctgacccccgccctagaacttttgccagtgccttttctgaaactcctgtgtcccgggccccccaggcggagaaggatatgccggattctgcctggggctgggctctaggagaccccaaatttgacaccacagaaagcaaataaaacacttgaaatacgcat

SEQ ID NO: 8620 - protein, 89 aa, Homo sapiens
MCTRFRLSTKQSRDSSPPCGRSTVHRKKPFPAKGDCVFCRRRRARSLQAQCGFSLTPALELLPVPFLKLLCPGPPRRRRICRILPGAGL

SEQ ID NO: 8621 - DNA, 421 bp, Homo sapiens
gaggacgggcctgaaagcattgactccatcatcgacatggatgctgtgtgcaagcgagtcaccacgttgggcctggatgtgtcggtgaccatctcgcaggatgccggcagccttggaagtcagaagtccaaggtcaaggtggtagcaggactggttccttctggaggtgctgagggaaaaaacccttccctgccaaaggtgactgtgttttctgccgccgaaggagggcccggtccctccaggctcagtgtggcttctccctgacccccgccctagaacttttgccagtgccttttctgaaactcctgtgtcccgggccccccaggcggagaaggatatgccggattctgcctggggctgggctctaggagaccccaaatttgacaccacagaaagcaaataaaacacttgaaatacgcat

SEQ ID NO: 8622 - protein, 75 aa, Homo sapiens
MDAVCKRVTTLGLDVSVTISQDAGSLGSQKSKVKVVAGLVPSGGAEGKNPSLPKVTVFSAAEGGPGPSRLSVASP

SEQ ID NO: 8623 - DNA, 488 bp, Homo sapiens
atgttggacctcctggagcagtcagagggcaaaatcaactattgccacaaacactgagggacgctcaggtctcctaagacctcatcctgctggggaccccacgaggggacatccaccctctggggtgtggccaggaaaagacaagctcttcagcttggggatccgatctggaagagagattctgatctgcccacctcctcttcctccttctctacaaaagctccggttgattcgagggaagaaaaaacccttccctgccaaaggtgactgtgttttctgccgccgaaggagggcccggtccctccaggctcagtgtggcttctccctgacccccgccctagaacttttgccagtgccttttctgaaactcctgtgtcccgggccccccaggcggagaaggatatgccggattctgcctggggctgggctctaggagaccccaaatttgacaccacagaaagcaaataaaacacttgaaatacgcatac

SEQ ID NO: 8624 - protein, 143 aa, Homo sapiens
CWTSWSSQRAKSTIATNTEGRSGLLRPHPAGDPTRGHPPSGVWPGKDKLFSLGIRSGREILICPPPLPPSLQKLRLIRGKKKPFPAKGDCVFCRRRRARSLQAQCGFSLTPALELLPVPFLKLLCPGPPRRRRICRILPGAGL

SEQ ID NO: 8625 - DNA, 1389 bp, Homo sapiens
aacttgggaggcagaggttgcagtgagctgagattgcacagctgcactccagcctgggtgacagagcgagactctgtctcaaaacaattggacttaagatggcatgtctttgttttagggccaaaaatgaggcccccttgcttaaggcatggggtccgtggccaggcaacggggtgggactgctgccccagatgtggccatgggggtcgtggtcctttcaacaccaagctatgagctgtcgccatggagaccagggccacctgtggaaaggcggattttgtctgcttttgacttttcttttttaatatgtaaaactccacatcagcggaaacccccccctacttctggcctggagcttcagggttttggtgctgggacgagtttgttgttctccttagcggggtggcgcggggggctcaaaacgggggcgcgggggctggagttggcagagctctgcatgtcccggcatgctgaggcaggaggatcacctatgcctgggaggttgaagccccagtgagccatgatcacaccactgtagtccagcccgggtgacacagcaagactctgtctcaaaaaaaaaaaaaaaaaaaatcctcatgcaagaagggaaggaccaagtcccattccctcttgcctcattttcagagcctggggtaggggctacaggtggcataggaagggtctgcaaggtgggtgggacttggcaggtgttgggaagaggaataggggtggcaagtgtcaatggtgaaaagacaggctgaggggtgtggtgggaaggctgggggagaaaggtgagaagtgattgggggggcttccctgatgagtcctcatggagggtgctgaggcagggaacaggggtgcagggacagtgatcagggcacctggtaccctgaccaacttgatgatggcatctcttttaagatgcccaagtctgcgcacttttattcctttattcggcccctagcaccccctccccaccccaaagaaggtcagttgcatgcgtgtggggatgtagctcaaaaaagaaataagatggagtggaaaggaaagaaaggaagaagcaggaattcaaggtgggtgggctgagcttggggccacctagcccacctgctccaatcaagggctggaacaaacctgaggccacttggagaggcagggctgggcagggacagggggtgggggccgaaatcacagcttccccatcagagccagatgtgtgaaggaaatgtcccagatggcagtagtttctcggcaaggaggggaatcctggagatggttcatgtctgtgatcccagtgctttgggaggctgaggtgggaggattgcttgagcccgggagttcgagaccagccctgggcaacatggcgagaccccatctctacagaaatta

SEQ ID NO: 8626 - protein, 122 aa, Homo sapiens
MGSVARQRGGTAAPDVAMGVVVLSTPSYELSPWRPGPPVERRILSAFDFSFLICKTPHQRKPPPTSGLELQGFGAGTSLLFSLAGWRGGLKTGARGLELAELCMSRHAEAGGSPMPGRLKPQ

SEQ ID NO: 8627 - DNA, 1930 bp, Homo sapiens
gggattacaggtgtgagctactgcgcctggccaagttttttacaaatatttttcttttggtggaactcatctgtgcactctctggtgtgtttttccacctttgttgggtcttggcttaaaatatcctcatgtgggctaggtgtggttactcacacctgtaatcctagcactttgggaggccaaggcagactgatcgcttgaggccaggagtttgcgaccagcctggccaacatagcaaaaccccatctctactaaaaatacaaaaattagtcaagagtggatggtgcgtgcctgtaatcccagctacctgggaggctgagacaggagaattgcttgaacctgggaggcagaggttgcagtggtgtgagatcacgccactgcattccagactgggcaacatagcaagactctgtcacaaaaaaaaaaaaaaaaaagaattccctgctctgcttttctgctcgttgctggcatagaaacatctagaacagaaagtatccactctggggcagatgggagagctggaaaagtagattcaagatgccttttagtcttggaagtttcttccaggaagcaagaccagctggtatgtttacacctgcactccagtgccctggggaggtgaccaggtggagggggatggctcatggaaatctgtcccgcacagctggcccccttttggctgccactgtctagactgttggcctttgacctctctgcctcttgtggcgtctgaacctagacgtcccttttggagacagctggacaaagccctattctccgcagccccagcctctatcctgaggcctctgggagctgcgtgacggccagcatggggtgctgatcatggtcaaggaggcaggtctttgccaggttgccccatgcagccacccatcctcagcatcctaacttgagggggcaggagagggctttgtttttataatccggattaaatttcccttccctgggcacaagtgcctcatgagggcccggggctgctggttgggagggaaagcatccccgtttttgcagtgaggaggccggccgagggctggggttccacttagacccttggcagaatggctgttgaggggcaggcgctgcccagtgcccacgtctggaaagctaattcccgggtggacgctgaacatacctgctgagagactctgtcccctggtttccaggacagttgtcacaagctgagtggggggggactcccaggacttgagggacccagtcccaccccaaactgctccccctcccccaaattccctttctcctcctgctctttctccccgctgtgcctcccccagttacccacagaagtgcctgcctctccagcgctcacagaacacacaaaaagggacaggaattggtcactgggtagtggccgtggctcctgacgatccagaccagcgtctggcccaagccattcagaggtggggtctggggcctgggggttttgtgtcgtgacactttgtctcaaggagattccacatagggatttgaattaggctttctgcttgccaaggcctgtggcatctgagcctggctgagggccgggcaagcctcccctgagcctttggaagccgagttcactctctgcctgcccaggggagcaccggcttggttctgggggctcctctaacatctcaggtttttatcttgtcttaaatttctttctaggaaaaaacccttccctgccaaaggtgactgtgttttctgccgccgaaggagggcccggtccctccaggctcagtgtggcttctccctgacccccgccctagaacttttgccagtgccttttctgaaactcctgtgtcccgggccccccaggcggagaaggatatgccggattctgcctggggctgggctctaggagaccccaaatttgacaccacagaaagcaaataaaacacttgaaatacgcata

SEQ ID NO: 8628 - protein, 51 aa, Homo sapiens
MPFSLGSFFQEARPAGMFTPALQCPGEVTRWRGMAHGNLSRTAGPLLAATV

SEQ ID NO: 8629 - DNA, 1633 bp, Homo sapiens
aatcccagctacctgggaggctgagacaggagaattgcttgaacctgggaggcagaggttgcagtggtgtgagatcacgccactgcattccagactgggcaacatagcaagactctgtcacaaaaaaaaaaaaaaaaaagaattccctgctctgcttttctgctcgttgctggcatagaaacatctagaacagaaagtatccactctggggcagatgggagagctggaaaagtagattcaagatgccttttagtcttggaagtttcttccaggaagcaagaccagctggtatgtttacacctgcactccagtgccctggggaggtgaccaggtggagggggatggctcatggaaatctgtcccgcacagctggcccccttttggctgccactgtctagactgttggcctttgacctctctgcctcttgtggcgtctgaacctagacgtcccttttggagacagctggacaaagccctattctccgcagccccagcctctatcctgaggcctctgggagctgcgtgacggccagcatggggtgctgatcatggtcaaggaggcaggtctttgccaggttgccccatgcagccacccatcctcagcatcctaacttgagggggcaggagagggctttgtttttataatccggattaaatttcccttccctgggcacaagtgcctcatgagggcccggggctgctggttgggagggaaagcatccccgtttttgcagtgaggaggccggccgagggctggggttccacttagacccttggcagaatggctgttgaggggcaggcgctgcccagtgcccacgtctggaaagctaattcccgggtggacgctgaacatacctgctgagagactctgtcccctggtttccaggacagttgtcacaagctgagtggggggggactcccaggacttgagggacccagtcccaccccaaactgctccccctcccccaaattccctttctcctcctgctctttctccccgctgtgcctcccccagttacccacagaagtgcctgcctctccagcgctcacagaacacacaaaaagggacaggaattggtcactgggtagtggccgtggctcctgacgatccagaccagcgtctggcccaagccattcagaggtggggtctggggcctgggggttttgtgtcgtgacactttgtctcaaggagattccacatagggatttgaattaggctttctgcttgccaaggcctgtggcatctgagcctggctgagggccgggcaagcctcccctgagcctttggaagccgagttcactctctgcctgcccaggggagcaccggcttggttctgggggctcctctaacatctcaggtttttatcttgtcttaaatttctttctaggaaaaaacccttccctgccaaaggtgactgtgttttctgccgccgaaggagggcccggtccctccaggctcagtgtggcttctccctgacccccgccctagaacttttgccagtgccttttctgaaactcctgtgtcccgggccccccaggcggagaaggatatgccggattctgcctggggctgggctctaggagaccccaaatttgacaccacagaaagcaaataaaacacttgaaatacgca

SEQ ID NO: 8630 - protein, 51 aa, Homo sapiens; identical to SEQ ID NO: 8628

SEQ ID NO: 8631 - DNA, 1142 bp, Homo sapiens
actgtctagactgttggcctttgacctctctgcctcttgtggcgtctgaacctagacgtcccttttggagacagctggacaaagccctattctccgcagccccagcctctatcctgaggcctctgggagctgcgtgacggccagcatggggtgctgatcatggtcaaggaggcaggtctttgccaggttgccccatgcagccacccatcctcagcatcctaacttgagggggcaggagagggctttgtttttataatccggattaaatttcccttccctgggcacaagtgcctcatgagggcccggggctgctggttgggagggaaagcatccccgtttttgcagtgaggaggccggccgagggctggggttccacttagacccttggcagaatggctgttgaggggcaggcgctgcccagtgcccacgtctggaaagctaattcccgggtggacgctgaacatacctgctgagagactctgtcccctggtttccaggacagttgtcacaagctgagtggggggggactcccaggacttgagggacccagtcccaccccaaactgctccccctcccccaaattcccttttgggtagtggccgtggctcctgacgatccagaccagcgtctggcccaagccattcagaggtggggtctggggcctgggggttttgtgtcgtgacactttgtctcaaggagattccacatagggatttgaattaggctttctgcttgccaaggcctgtggcatctgagcctggctgagggccgggcaagcctcccctgagcctttggaagccgagttcactctctgcctgcccaggggagcaccggcttggttctgggggctcctctaacatctcaggtttttatcttgtcttaaatttctttctaggaaaaaacccttccctgccaaaggtgactgtgttttctgccgccgaaggagggcccggtccctccaggctcagtgtggcttctccctgacccccgccctagaacttttgccagtgccttttctgaaactcctgtgtcccgggccccccaggcggagaaggatatgccggattctgcctggggctgggctctaggagaccccaaatttgacaccacagaaagcaaataaaacacttgaaatacgcata

SEQ ID NO: 8632 - protein, 26 aa, Homo sapiens
MAVEGQALPSAHVWKANSRVDAEHTC

SEQ ID NO: 8633 - DNA, 670 bp, Homo sapiens
atggtcccagccctgctgactcatactcagctgccacggtccgctttccctgctgagcacgggggtgggggcgggggggaagagggggagggaagggcacctgaccgaggccagaggcccagaaaggacagaaggtcatggctggggagaagcaggcaggagaaccgagtcttggccttaactggctggcaacgtaaaacctgccctccacaaggacaagatgaaaacttggggatttggaggggacaacaaattagactcaatcacaatttcaaacttttggatgtcaatatatccatcaagaaattgaaaagaggcctggcatggtggccgatgcctgtcatcccagcactttgggagaccaacgtcggaggatcacttgaggtcaggagttccagaccagcctgggcaacgtggtcccaggagttgcagaaacgccaccaggaccttcagagcaccagttagacaaggagagccaggaggagctgggccccaacctcatccaaaagcacagactcccaggctggaatggtgtcctcatatcgaggaagaggatactgaggcccagaaatgtgccctagctttactaggagcgcccccacctaaagatcctccccctaaatacacccccagaccccgcccagctgtggtcattggagtgtttactctg

SEQ ID NO: 8634 - protein, 154 aa, Homo sapiens
MVPALLTHTQLPRSAFPAEHGGGGGGEEGEGRAPDRGQRPRKDRRSWLGRSRQENRVLALTGWQRKTCPPQGQDENLGIWRGQQIRLNHNFKLLDVNISIKKLKRGLAWWPMPVIPALWETNVGGSLEVRSSRPAWATWSQELQKRHQDLQSTS

SEQ ID NO: 8635 - DNA, 1264 bp, Homo sapiens
gcacagccatgcccaggccaggacccgtgacacagcgatgctctcagatgctgctgatgttacagatgttgttgggggcaccctgagggggcaccctgactctgcaggtgagaaccttctggggttcctaggaccctcggacaagcactctgatccggatgactccaggtcccaggagttgcagaaacgccaccaggaccttcagagcaccagttagacaaggagagccaggaggagctgggccccaacctcatccaaaagcacagactcccaggctggaatggtgtcctcatatcgaggaagaggatactgaggcccagaaatgtgccctagctttactaggagcgcccccacctaaagatcctccccctaaatacacccccagaccccgcccagctgtggtcattggagtgtttactctgcaggcagggggaggagggcgggactgagcaggcggagacggacaaagtccggggactataaaggccggtccggcagcatctggtcagtcccagctcagagccgcaacctgcacagccatgcccgggcaagaactcaggacggtgaatggctctcagatgctcctggtgttgctggtgctctcgtggctgccgcatgggggcgccctgtctctggccgaggcgagccgcgcaagtttcccgggaccctcagagttgcactccgaagactccagattccgagagttgcggaaacgctacgaggacctgctaaccaggctgcgggccaaccagagctgggaagattcgaacaccgacctcgtcccggcccctgcagtccggatactcacgccagaaggtaagtgaaatcttagagatcccctcccaccccccaagcagcccccatatctaatcagggattcctcatcttgaaaagcccagacctacctttgagcctcagttgccccatctgtgccctgggtaggaatatcctggatccccttgggtctgatggggtagccgatgcctgatttgcacccacaacgtgggaggttataacctgtccccaagttgcaaatggggaaactgaggtacagggatgccagggaccctcctgaatgtgcacagcacctgggaaacccggggacggggtcgggcgtgcggtgtgggcatggtccctgacctgggctggggccaggatccaagagaaacaatgggggtgtggtgcatggatagaagtttgtgatgggcagagccagctggagctggttctgaatctgatgaaatcgcttgtcaaggcactgcta

SEQ ID NO: 8636 - protein, 96 aa, Homo sapiens
MTPGPRSCRNATRTFRAPVRQGEPGGAGPQPHPKAQTPRLEWCPHIEEEDTEAQKCALALLGAPPPKDPPPKYTPRPRPAVVIGVFTLQAGGGGRD

SEQ ID NO: 8637 - DNA, 1304 bp, Homo sapiens
ctgaggcccagaaatgtgccctagctttactaggagcgcccccacctaaagatcctccccctaaatacacccccagaccccgcccagctgtggtcattggagtgtttactctgcaggcagggggaggagggcgggactgagcaggcggagacggacaaagtccggggactataaaggccggtccggcagcatctggtcagtcccagctcagagccgcaacctgcacagccatgcccgggcaagaactcaggacggtgaatggctctcagatgctcctggtgttgctggtgctctcgtggctgccgcatgggggcgccctgtctctggccgaggcgagccgcgcaagtttcccgggaccctcagagttgcactccgaagactccagattccgagagttgcggaaacgctacgaggacctgctaaccaggctgcgggccaaccagagctgggaagattcgaacaccgacctcgtcccggcccctgcagtccggatactcacgccagaagtgcggctgggatccggcggccacctgcacctgcgtatctctcgggccgcccttcccgaggggctccccgaggcctcccgccttcaccgggctctgttccggctgtccccgacggcgtcaaggtcgtgggacgtgacacgaccgctgcggcgtcagctcagccttgcaagaccccaggcgcccgcgctgcacctgcgactgtcgccgccgccgtcgcagtcggaccaactgctggcagaatcttcgtccgcacggccccagctggagttgcacttgcggccgcaagccgccagggggcgccgcagagcgcgtgcgcgcaacggggaccactgtccgctcgggcccgggcgttgctgccgtctgcacacggtccgcgcgtcgctggaagacctgggctgggccgattgggtgctgtcgcctgaagcccgacacggtgccagcgccctgctgcgtgcccgccagctacaatcccatggtgctcattcaaaagaccgacaccggggtgtcgctccagacctatgatgacttgttagccaaagactgccactgcatatgagcagtcctggtccttccactgtgcacctgcgcggaggacgcgacctcagttgtcctgccctgtggaatgggctcaaggttcctgagacacccgattcctgcccaaacagctgtatttatataagtctgttatttattattaatttattggggtgaccttcttggggactcgggggctggtctgatggaactgtgtatttatttaaaactctggtgataaaaataaagctgtctgaactgttc

SEQ ID NO: 8638 - protein, 265 aa, Homo sapiens
MPGQELRTVNGSQMLLVLLVLSWLPHGGALSLAEASRASFPGPSELHSEDSRFRELRKRYEDLLTRLRANQSWEDSNTDLVPAPAVRILTPEVRLGSGGHLHLRISRAALPEGLPEASRLHRALFRLSPTASRSWDVTRPLRRQLSLARPQAPALHLRLSPPPSQSDQLLAESSSARPQLELHLRPQAARGRRRARARNGDHCPLGPGRCCRLHTVRASLEDLGWADWVLSPEARHGASALLRARQLQSHGAHSKDRHRGVAPDL

SEQ ID NO: 8639 - DNA, 1214 bp, Homo sapiens
gcagcatctggtcagtcccagctcagagccgcaacctgcacagccatgcccgggcaagaactcaggacggtgaatggctctcagatgctcctggtgttgctggtgctctcgtggctgccgcatgggggcgccctgtctctggccgaggcgagccgcgcaagtttcccgggaccctcagagttgcactccgaagactccagattccgagagttgcggaaacgctacgaggacctgctaaccaggctgcgggccaaccagagctgggaagattcgaacaccgacctcgtcccggcccctgcagtccggatactcacgccagaagtgcggctgggatccggcggccacctgcacctgcgtatctctcgggccgcccttcccgaggggctccccgaggcctcccgccttcaccgggctctgttccggctgtccccgacggcgtcaaggtcgtgggacgtgacacgaccgctgcggcgtcagctcagccttgcaagaccccaggcgcccgcgctgcacctgcgactgtcgccgccgccgtcgcagtcggaccaactgctggcagaatcttcgtccgcacggccccagctggagttgcacttgcggccgcaagccgccagggggcgccgcagagcgcgtgcgcgcaacggggaccactgtccgctcgggcccgggcgttgctgccgtctgcacacggtccgcgcgtcgctggaagacctgggctgggccgattgggtgctgtcgccacgggaggtgcaagtgaccatgtgcatcggcgcgtgcccgagccagttccgggcggcaaacatgcacgcgcagatcaagacgagcctgcaccgcctgaagcccgacacggtgccagcgccctgctgcgtgcccgccagctacaatcccatggtgctcattcaaaagaccgacaccggggtgtcgctccagacctatgatgacttgttagccaaagactgccactgcatatgagcagtcctggtccttccactgtgcacctgcgcggaggacgcgacctcagttgtcctgccctgtggaatgggctcaaggttcctgagacacccgattcctgcccaaacagctgtatttatataagtctgttatttattattaatttattggggtgaccttcttggggactcgggggctggtctgatggaactgtgtatttatttaaaactctggtgataaaaataaagctgtctgaactgttc

SEQ ID NO: 8640 - protein, 308 aa, Homo sapiens
MPGQELRTVNGSQMLLVLLVLSWLPHGGALSLAEASRASFPGPSELHSEDSRFRELRKRYEDLLTRLRANQSWEDSNTDLVPAPAVRILTPEVRLGSGGHLHLRISRAALPEGLPEASRLHRALFRLSPTASRSWDVTRPLRRQLSLARPQAPALHLRLSPPPSQSDQLLAESSSARPQLELHLRPQAARGRRRARARNGDHCPLGPGRCCRLHTVRASLEDLGWADWVLSPREVQVTMCIGACPSQFRAANMHAQIKTSLHRLKPDTVPAPCCVPASYNPMVLIQKTDTGVSLQTYDDLLAKDCHCI

SEQ ID NO: 8641 - DNA, 820 bp, Homo sapiens
gcagcatctggtcagtcccagctcagagccgcaacctgcacagccatgcccgggcaagaactcaggacggtgaatggctctcagatgctcctggtgttgctggtgctctcgtggctgccgcatgggggcgccctgtctctggccgaggcgagccgcgcaagtttcccgggaccctcagagttgcactccgaagactccagattccgagagttgcggaaacgctacgaggacctgctaaccaggctgcgggccaaccagagctgggaagattcgaacaccgacctcgtcccggcccctgcagtccggatactcacgccagaagtgcggctgggatccggcggccacctgcacctgtgcaagtgaccatgtgcatcggcgcgtgcccgagccagttccgggcggcaaacatgcacgcgcagatcaagacgagcctgcaccgcctgaagcccgacacggtgccagcgccctgctgcgtgcccgccagctacaatcccatggtgctcattcaaaagaccgacaccggggtgtcgctccagacctatgatgacttgttagccaaagactgccactgcatatgagcagtcctggtccttccactgtgcacctgcgcggaggacgcgacctcagttgtcctgccctgtggaatgggctcaaggttcctgagacacccgattcctgcccaaacagctgtatttatataagtctgttatttattattaatttattggggtgaccttcttggggactcgggggctggtctgatggaactgtgtatttatttaaaactctggtgataaaaataaagctgtctgaactgttc

SEQ ID NO: 8642 - protein, 105 aa, Homo sapiens
MPGQELRTVNGSQMLLVLLVLSWLPHGGALSLAEASRASFPGPSELHSEDSRFRELRKRYEDLLTRLRANQSWEDSNTDLVPAPAVRILTPEVRLGSGGHLHLCK

SEQ ID NO: 8643 - DNA, 1052 bp, Homo sapiens
gcagcatctggtcagtcccagctcagagccgcaacctgcacagccatgcccgggcaagaactcaggacggtgaatggctctcagatgctcctggtgttgctggtgctctcgtggctgccgcatgggggcgccctgtctctggccgaggcgagccgcgcaagtttcccgggaccctcagagttgcactccgaagactccagattccgagagttgcggaaacgctacgaggacctgctaaccaggctgcgggccaaccagagctgggaagattcgaacaccgacctcgtcccggcccctgcagtccggatactcacgccagaagtgcggctgggatccggcggccacctgcacctgcgactgtcgccgccgccgtcgcagtcggaccaactgctggcagaatcttcgtccgcacggccccagctggagttgcacttgcggccgcaagccgccagggggcgccgcagagcgcgtgcgcgcaacggggaccactgtccgctcgggcccgggcgttgctgccgtctgcacacggtccgcgcgtcgctggaagacctgggctgggccgattgggtgctgtcgccacgggaggtgcaagtgaccatgtgcatcggcgcgtgcccgagccagttccgggcggcaaacatgcacgcgcagatcaagacgagcctgcaccgcctgaagcccgacacggtgccagcgccctgctgcgtgcccgccagctacaatcccatggtgctcattcaaaagaccgacaccggggtgtcgctccagacctatgatgacttgttagccaaagactgccactgcatatgagcagtcctggtccttccactgtgcacctgcgcggaggacgcgacctcagttgtcctgccctgtggaatgggctcaaggttcctgagacacccgattcctgcccaaacagctgtatttatataagtctgttatttattattaatttattggggtgaccttcttggggactcgggggctggtctgatggaactgtgtatttatttaaaactctggtgataaaaataaagctgtctgaactgttc

SEQ ID NO: 8644 - protein, 254 aa, Homo sapiens
MPGQELRTVNGSQMLLVLLVLSWLPHGGALSLAEASRASFPGPSELHSEDSRFRELRKRYEDLLTRLRANQSWEDSNTDLVPAPAVRILTPEVRLGSGGHLHLRLSPPPSQSDQLLAESSSARPQLELHLRPQAARGRRRARARNGDHCPLGPGRCCRLHTVRASLEDLGWADWVLSPREVQVTMCIGACPSQFRAANMHAQIKTSLHRLKPDTVPAPCCVPASYNPMVLIQKTDTGVSLQTYDDLLAKDCHCI

SEQ ID NO: 8645 - DNA, 973 bp, Homo sapiens
catcggcctcccaaagtgctgggattacaggcgtgagccaccgcgcccgcacggagaaatgctcttggtaggggaaataacttgtgcaaaggcgccgccgccgtggtgagatccagcttggcgtgttaggggaaatgggcaccctcgttcctggaaaacggtaggcctgtgggtgaccagcttccctatctgtcttcccacagtgcggctgggatccggcggccacctgcacctgcgtatctctcgggccgcccttcccgaggggctccccgaggcctcccgccttcaccgggctctgttccggctgtccccgacggcgtcaaggtcgtgggacgtgacacgaccgctgcggcgtcagctcagccttgcaagaccccaggcgcccgcgctgcacctgcgactgtcgccgccgccgtcgcagtcggaccaactgctggcagaatcttcgtccgcacggccccagctggaacctgggctgggccgattgggtgctgtcgccacgggaggtgcaagtgaccatgtgcatcggcgcgtgcccgagccagttccgggcggcaaacatgcacgcgcagatcaagacgagcctgcaccgcctgaagcccgacacggtgccagcgccctgctgcgtgcccgccagctacaatcccatggtgctcattcaaaagaccgacaccggggtgtcgctccagacctatgatgacttgttagccaaagactgccactgcatatgagcagtcctggtccttccactgtgcacctgcgcggaggacgcgacctcagttgtcctgccctgtggaatgggctcaaggttcctgagacacccgattcctgcccaaacagctgtatttatataagtctgttatttattattaatttattggggtgaccttcttggggactcgggggctggtctgatggaactgtgtatttatttaaaactctggtgataaaaataaagctgtctgaactgttc

SEQ ID NO: 8646 - protein, 70 aa, Homo sapiens [sequence omitted]

SEQ ID NO: 8647 - DNA, 2234 bp, Homo sapiens
ctccacccagacaccagttcctcttccccctgagtcgctgggtgcagagccagaggaacgccagcgaccccagcagcgctgcggacggtgctggccgtggccgctgcggcccccgtgtccaggtgggccaggacgcagcctctgggcgccgtcgcttttccagcatcgcagaggcaaaagcgtggcagtgggacccaaaaggtaggactgaggctctagaacttgcacctgtgcagggactgcaaaccagacctgggaggaccctttcagcagcccccactccaccctatcccaggacttcccagcgacccgccgttctgggagataccgggagcgtgatcagggggcggggccgtttccaaggcaaccgcttatttgcatagggtcccgtcctggccaacgagggcgccccaaatgttcaggacatagaagaaggggttaactggcccggatctcctcctcgccttccaagcccgctaagcactggggttatctacccattccccagaaggggagactgaggcagcccaccagccaaaggaggcgaccagactggggctgcgttttaccatttcagaagcggcttgagctggtctgagctataataataaacactggcggtggaggcgagggcgaccacagggctgaggtcagggctaggattccggtgtctctacgtaggttgcttgaatggggggcaccctggcatggacgctgctgttgccgctgctgctgcgggagtcagacagcctagaaccgtcgtgcaccgtgtcctccgcggatgtggactggaacgcggagttcagtgccacgtgcctgaatttcagtggcctcagcctgagcctgcctcacaaccagtctctgcgggccagcaacgtgattctccttgacctgtcttgacctgcaggccgactgcaactctctgccttcctggaggtcagctgcgcccctggcctggcctctgcaactatcggggcagtggtggtcagcgggtgcctgcttcttggacttgccatcgctggccctgtgctggcctggagactctggcgatgccgagtggccagaagccgggagctgaacaaaccctgggctgctcaggatgggcccaagcccggtttaggcttgcagccacggtacggcagccggagcgcccccaagccccaagtggccgtgccatcctgcccctccactcccgactatgagaacatgtttgtgggccagccagcagccgagcaccagtgggatgaacaaggggctcacccttcagaggacaatgacttttacatcaactacaaggacatcgacctggcttcccagcctgtctactgtaacctgcagtcactgggccaggccccaatggatgaagaggagtacgtgatccccgggcactgagcctaagatgtcctaacctccacccagaaccccttcagtccctgctgggtgactcagggcgtcctaacgcctccatggcctcagtttccccatctgaagaatgggtacaggaaaggattgtccttgaggccccaggaagctctgccgccccctccctgtccctcatgccgctcctcagctccctcagctcctagagggggaagaggagagacccccaacaaggggacaggacggtcactgtgccaatcctgtcatcaccctcctgtggatgtacaggcagtgctcaataaatgcttcgaggctgatgaggctgctggctcagggtgcgtgggttcctcaaggtggggatttctgagttctaagaccaagtctccatctgagactcccaaattgctccccacctcccatccctgtttttttttgttgttgttgtttgtttgtttgtttttgaaactgagtgtcactctgtcacccaggctggagtgcaatgctgcggtctcagctcactgcaacctccgcctcctgggttcaagtgattctcctgcctcagcctcctgagtagctgggattacagcacccgccaccatgccgagctaatttttgtatttataatagagatggggtttcgccatgttggccaggctggtctcgaactcctgacctcaagcgatctgcccgcctcggcctcctgaagtgctgggattacaggcgtggccactgcgcccaggcacattcctcccttctgcccctctcagggccccttcccaggtccctgatctccaggcttggcctccagagcagcccacaccaaccccaaaataaaaaaatgtatatattccttt

SEQ ID NO: 8648 - protein, 69 aa, Homo sapiens
MGGTLAWTLLLPLLLRESDSLEPSCTVSSADVDWNAEFSATCLNFSGLSLSLPHNQSLRASNVILLDLS

SEQ ID NO: 8649 - DNA, 1970 bp, Homo sapiens
ctccacccagacaccagttcctcttccccctgagtcgctgggtgcagagccagaggaacgccagcgaccccagcagcgctgcggacggtgctggccgtggccgctgcggcccccgtgtccaggtgggccaggacgcagcctctgggcgccgtcgcttttccagcatcgcagaggcaaaagcgtggcagtgggacccaaaaggttgcttgaatggggggcaccctggcatggacgctgctgttgccgctgctgctgcgggagtcagacagcctagaaccgtcgtgcaccgtgtcctccgcggatgtggactggaacgcggagttcagtgccacgtgcctgaatttcagtggcctcagcctgagcctgcctcacaaccagtctctgcgggccagcaacgtgattctccttgacctgtctgggaacggcctgcgagagcttccagtgaccttctttgcccacctgcagaagcttgaggtcctgaacgtgctacgcaaccccttgtctcgtgtggatggggcgctggccgcccgctgtgaccttgacctgcaggccgactgcaactgtgccctggagtcctggcacgacatccgccgagacaactgctctggccagaagcctctgctctgctgggacacaaccagctcccagcacaacctctctgccttcctggaggtcagctgcgcccctggcctggcctctgcaactatcggggcagtggtggtcagcgggtgcctgcttcttggacttgccatcgctggccctgtgctggcctggagactctggcgatgccgagtggccagaagccgggagctgaacaaaccctgggctgctcaggatgggcccaagcccggtttaggcttgcagccacggtacggcagccggagcgcccccaagccccaagtggccgtgccatcctgcccctccactcccgactatgagaacatgtttgtgggccagccagcagccgagcaccagtgggatgaacaaggggctcacccttcagaggacaatgacttttacatcaactacaaggacatcgacctggcttcccagcctgtctactgtaacctgcagtcactgggccaggccccaatggatgaagaggagtacgtgatccccgggcactgagcctaagatgtcctaacctccacccagaaccccttcagtccctgctgggtgactcagggcgtcctaacgcctccatggcctcagtttccccatctgaagaatgggtacaggaaaggattgtccttgaggccccaggaagctctgccgccccctccctgtccctcatgccgctcctcagctccctcagctcctagagggggaagaggagagacccccaacaaggggacaggacggtcactgtgccaatcctgtcatcaccctcctgtggatgtacaggcagtgctcaataaatgcttcgaggctgatgaggctgctggctcagggtgcgtgggttcctcaaggtggggatttctgagttctaagaccaagtctccatctgagactcccaaattgctccccacctcccatccctgtttttttttgttgttgttgtttgtttgtttgtttttgaaactgagtgtcactctgtcacccaggctggagtgcaatgctgcggtctcagctcactgcaacctccgcctcctgggttcaagtgattctcctgcctcagcctcctgagtagctgggattacagcacccgccaccatgccgagctaatttttgtatttataatagagatggggtttcgccatgttggccaggctggtctcgaactcctgacctcaagcgatctgcccgcctcggcctcctgaagtgctgggattacaggcgtggccactgcgcccaggcacattcctcccttctgcccctctcagggccccttcccaggtccctgatctccaggcttggcctccagagcagcccacaccaaccccaaaataaaaaaatgtatatattccttt

SEQ ID NO: 8650 - protein, 305 aa, Homo sapiens; identical to SEQ ID NO: 1228

SEQ ID NO: 8651 - DNA, 2450 bp, Homo sapiens
ctccacccagacaccagttcctcttccccctgagtcgctgggtgcagagccagaggaacgccagcgaccccagcagcgctgcggacggtgctggccgtggccgctgcggcccccgtgtccaggtgggccaggacgcagcctctgggcgccgtcgcttttccagcatcgcagaggcaaaagcgtggcagtgggacccaaaaggtaggactgaggctctagaacttgcacctgtgcagggactgcaaaccagacctgggaggaccctttcagcagcccccactccaccctatcccaggacttcccagcgacccgccgttctgggagataccgggagcgtgatcagggggcggggccgtttccaaggcaaccgcttatttgcatagggtcccgtcctggccaacgagggcgccccaaatgttcaggacatagaagaaggggttaactggcccggatctcctcctcgccttccaagcccgctaagcactggggttatctacccattccccagaaggggagactgaggcagcccaccagccaaaggaggcgaccagactggggctgcgttttaccatttcagaagcggcttgagctggtctgagctataataataaacactggcggtggaggcgagggcgaccacagggctgaggtcagggctaggattccggtgtctctacgtaggttgcttgaatggggggcaccctggcatggacgctgctgttgccgctgctgctgcgggagtcagacagcctagaaccgtcgtgcaccgtgtcctccgcggatgtggactggaacgcggagttcagtgccacgtgcctgaatttcagtggcctcagcctgagcctgcctcacaaccagtctctgcgggccagcaacgtgattctccttgacctgtctgggaacggcctgcgagagcttccagtgaccttctttgcccacctgcagaagcttgaggtcctgaacgtgctacgcaaccccttgtctcgtgtggatggggcgctggccgcccgctgtgaccttgacctgcaggccgactgcaactgtgccctggagtcctggcacgacatccgccgagacaactgctctggccagaagcctctgctctgctgggacacaaccagctcccagcacaacctctctgccttcctggaggtcagctgcgcccctggcctggcctctgcaactatcggggcagtggtggtcagcgggtgcctgcttcttggacttgccatcgctggccctgtgctggcctggagactctggcgatgccgagtggccagaagccgggagctgaacaaaccctgggctgctcaggatgggcccaagcccggtttaggcttgcagccacggtacggcagccggagcgcccccaagccccaagtggccgtgccatcctgcccctccactcccgactatgagaacatgtttgtgggccagccagcagccgagcaccagtgggatgaacaaggggctcacccttcagaggacaatgacttttacatcaactacaaggacatcgacctggcttcccagcctgtctactgtaacctgcagtcactgggccaggccccaatggatgaagaggagtacgtgatccccgggcactgagcctaagatgtcctaacctccacccagaaccccttcagtccctgctgggtgactcagggcgtcctaacgcctccatggcctcagtttccccatctgaagaatgggtacaggaaaggattgtccttgaggccccaggaagctctgccgccccctccctgtccctcatgccgctcctcagctccctcagctcctagagggggaagaggagagacccccaacaaggggacaggacggtcactgtgccaatcctgtcatcaccctcctgtggatgtacaggcagtgctcaataaatgcttcgaggctgatgaggctgctggctcagggtgcgtgggttcctcaaggtggggatttctgagttctaagaccaagtctccatctgagactcccaaattgctccccacctcccatccctgtttttttttgttgttgttgtttgtttgtttgtttttgaaactgagtgtcactctgtcacccaggctggagtgcaatgctgcggtctcagctcactgcaacctccgcctcctgggttcaagtgattctcctgcctcagcctcctgagtagctgggattacagcacccgccaccatgccgagctaatttttgtatttataatagagatggggtttcgccatgttggccaggctggtctcgaactcctgacctcaagcgatctgcccgcctcggcctcctgaagtgctgggattacaggcgtggccactgcgcccaggcacattcctcccttctgcccctctcagggccccttcccaggtccctgatctccaggcttggcctccagagcagcccacaccaaccccaaaataaaaaaatgtatatattccttt

SEQ ID NO: 8652 - protein, 305 aa, Homo sapiens; identical to SEQ ID NO: 1228

SEQ ID NO: 8653 - DNA, 1060 bp, Homo sapiens
ctccacccagacaccagttcctcttccccctgagtcgctgggtgcagagccagaggaacgccagcgaccccagcagcgctgcggacggtgctggccgtggccgctgcggcccccgtgtccaggtgggccaggacgcagcctctgggcgccgtcgcttttccagcatcgcagaggcaaaagcgtggcagtgggacccaaaagaagcggcttgagctggtctgagctataataataaacactggcggtggaggcgagggcgaccacagggctgaggtcagggctaggattccggtgtctctacgtaggttgcttgaatggggggcaccctggcatggacgctgctgttgccgctgctgctgcgggagtcagacagcctagaaccgtcgtgcaccgtgtcctccgcggatgtggactggaacgcggagttcagtgccacgtgcctgaatttcagtggcctcagcctgagcctgcctcacaaccagtctctgcgggccagcaacgtgattctccttgacctgtctgggaacggcctgcgagagcttccagtgaccttctttgcccacctgcagaagcttgaggtcctgaacgtgctacgcaaccccttgtctcgtgtggatggggcgctggccgcccgctgtgaccttgacctgcaggccgactgcaactgtgccctggagtcctggcacgacatccgccgagacaactgctctggccagaagcctctgctctgctgggacacaaccagctcccagcacaacctctctgccttcctggaggtcagctgcgcccctggcctggcctctgcaactatcggggcagtggtggtcagcgggtgcctgcttcttggacttgccatcgctggccctgtgctggcctggagactctggcgatgccgagtggccagaagccgggagctgaacaaaccctgggctgctcaggatgggcccaagcccggtttaggcttgcagccacggtacggcagccggagcgcccccaagccccaagtggccgtgccatcctgcccctccactcccgactatgagaacatgtttgtgggcca

SEQ ID NO: 8654 - protein, 247 aa, Homo sapiens
MGGTLAWTLLLPLLLRESDSLEPSCTVSSADVDWNAEFSATCLNFSGLSLSLPHNQSLRASNVILLDLSGNGLRELPVTFFAHLQKLEVLNVLRNPLSRVDGALAARCDLDLQADCNCALESWHDIRRDNCSGQKPLLCWDTTSSQHNLSAFLEVSCAPGLASATIGAVVVSGCLLLGLAIAGPVLAWRLWRCRVARSRELNKPWAAQDGPKPGLGLQPRYGSRSAPKPQVAVPSCPSTPDYENMFV

SEQ ID NO: 8655 - DNA, 915 bp, Homo sapiens
ttaagagctgcgcccgcgggcggcgtagaggcagcgggcgggggcgcgcgcggcgggaggaggggagcgcgcgtttcccggaacagcccgcgcggaggaaagggaggaaaaaaagccaccctgcggccggggccggagctggagccgccgctgccgccgccgccgcggccgtctggagctcccccgcgcggacgatgcctgccgtgcccgcctggggctcggggcggtgaggcccggggcgcggggtagctatggcgacggcaagcgcggcccgcggcgccgcctgacaggtgtgggccccggcggcggcggcgtggagcagcatgtacgccaaggggggcaagggttcggccgtgccctccgacagccaggcccgcgagaagttggcgctgtacgtttatgagtacctgctgcacatcggtgcccagaagtcagcccagaccttcctgtctgagatccgatgggagaagaacatcacgctgggggagccccctgggttcctgcactcctggtggtgcgtcttctgggacctgtactgcgcggcgcctgacagaagagaggcctgcgagcactccggcgaggccaaggccttccaggactatagtgctgcagccgcccccagccccgttatggggagtatggccccaggtgacacaatggccgcaggctccatggcggctggcttcttccaggtatggccccggctggagtccactggcccccaactctggctgaacatgcgtttgagggtggggggggtcccacgtgggcagaggtcatgaggccggcaggctggagttgggtgggagggtcctctgtgccgcaggtgtgcccaggtgggcctttcaggggccagcgagggagggcccgagtgcagtggagggtgggtgtctgtgcacttggcctgcacatgtg

SEQ ID NO: 8656 - protein, 152 aa, Homo sapiens
MYAKGGKGSAVPSDSQAREKLALYVYEYLLHIGAQKSAQTFLSEIRWEKNITLGEPPGFLHSWWCVFWDLYCAAPDRREACEHSGEAKAFQDYSAAAAPSPVMGSMAPGDTMAAGSMAAGFFQVWPRLESTGPQLWLNMRLRVGGVPRGQRS

SEQ ID NO: 8657 - DNA, 804 bp, Homo sapiens
ttaagagctgcgcccgcgggcggcgtagaggcagcgggcgggggcgcgcgcggcgggaggaggggagcgcgcgtttcccggaacagcccgcgcggaggaaagggaggaaaaaaagccaccctgcggccggggccggagctggagccgccgctgccgccgccgccgcggccgtctggagctcccccgcgcggacgatgcctgccgtgcccgcctggggctcggggcggtgaggcccggggcgcggggtagctatggcgacggcaagcgcggcccgcggcgccgcctgacaggtgtgggccccggcggcggcggcgtggagcagcatgtacgccaaggggggcaagggttcggccgtgccctccgacagccaggcccgcgagaagttggcgctgtacgtttatgagtacctgctgcacatcggtgcccagaagtcagcccagaccttcctgtctgagcgtcttctgggacctgtactgcgcggcgcctgacagaagagaggcctgcgagcactccggcgaggccaaggccttccaggactatagtgctgcagccgcccccagccccgttatggggagtatggccccaggtgacacaatggccgcaggctccatggcggctggcttcttccagcccttcatgtcaccgcgcttcccagggggcccccggcccaccctgcggatgccgagtcagagctatggaggtggcatgcgacccccacccaactccctcgccggcccaggcctgcctgccatgaacatgggcccaggagttcgtggcccgtgggccagccccagtggaaactcg

SEQ ID NO: 8658 - protein, 134 aa, Homo sapiens
MSTCCTSVPRSQPRPSCLSVFWDLYCAAPDRREACEHSGEAKAFQDYSAAAAPSPVMGSMAPGDTMAAGSMAAGFFQPFMSPRFPGGPRPTLRMPSQSYGGGMRPPPNSLAGPGLPAMNMGPGVRGPWASPSGN

SEQ ID NO: 8659 - DNA, 1408 bp, Homo sapiens
ttaagagctgcgcccgcgggcggcgtagaggcagcgggcgggggcgcgcgcggcgggaggaggggagcgcgcgtttcccggaacagcccgcgcggaggaaagggaggaaaaaaagccaccctgcggccggggccggagctggagccgccgctgccgccgccgccgcggccgtctggagctcccccgcgcggacgatgcctgccgtgcccgcctggggctcggggcggtgaggcccggggcgcggggtagctatggcgacggcaagcgcggcccgcggcgccgcctgacaggtgtgggccccggcggcggcggcgtggagcagcatgtacgccaaggggggcaagggttcggccgtgccctccgacagccaggcccgcgagaagttggcgctgtacgtttatgagtacctgctgcacatcggtgcccagaagtcagcccagaccttcctgtctgagatccgatgggagaagaacatcacgctgggggagccccctgggttcctgcactcctggtggtgcgtcttctgggacctgtactgcgcggcgcctgacagaagagaggcctgcgagcactccggcgaggccaaggccttccaggactatagtgctgcagccgcccccagccccgttatggggagtatggccccaggtgacacaatggccgcaggctccatggcggctggcttcttccagggcccccccggctcccagccgtccccccacaaccccaacgcccccatgatggggcctcacggtcagcccttcatgtcaccgcgcttcccagggggcccccggcccaccctgcggatgccgagtcagggcatccgagcatgggcggcccaatgcagagggtgacgcctcctcgtggcatggccccatggccgccatgagcgcgatggagcctcaccacgtgaacggatccctgggctcgggcgacatggacgggttgccgaagagttcccccggcgccgtggccggcctgagcaacgccccgggcaccccgcgggacgacggcgagatggcggccgccgggaccttcctgcacccgttcccgagcgaaagctactcgccagggatgaccatgagcgtgtgatggggcggcagccccgggcctctctgcgggcctaggcttctgcccagcgcccctgctcagggcgaggggctgaggtcacacctcgggcacctggactcctggccaatcaaggcttgcccagctgggaggccccacacgaaagactcttaccattttattaaaaacgcaaggacctcagagacgttcttttctgtatggacccttcctgccatttgtattttgtcccagagagaaaggctctttggggggcccctctccccaggacgtcagggggtggggcccataaataaatggaagctggttttggtttttggta

SEQ ID NO: 8660 - protein, 176 aa, Homo sapiens
MYAKGGKGSAVPSDSQAREKLALYVYEYLLHIGAQKSAQTFLSEIRWEKNITLGEPPGFLHSWWCVFWDLYCAAPDRREACEHSGEAKAFQDYSAAAAPSPVMGSMAPGDTMAAGSMAAGFFQGPPGSQPSPHNPNAPMMGPHGQPFMSPRFPGGPRPTLRMPSQGIRAWAAQCRG

SEQ ID NO: 8661 - DNA, 1797 bp, Homo sapiens
ttaagagctgcgcccgcgggcggcgtagaggcagcgggcgggggcgcgcgcggcgggaggaggggagcgcgcgtttcccggaacagcccgcgcggaggaaagggaggaaaaaaagccaccctgcggccggggccggagctggagccgccgctgccgccgccgccgcggccgtctggagctcccccgcgcggacgatgcctgccgtgcccgcctggggctcggggcggtgaggcccggggcgcggggtagctatggcgacggcaagcgcggcccgcggcgccgcctgacaggtgtgggccccggcggcggcggcgtggagcagcatgtacgccaaggggggcaagggttcggccgtgccctccgacagccaggcccgcgagaagttggcgctgtacgtttatgagtacctgctgcacatcggtgcccagaagtcagcccagaccttcctgtctgagatccgatgggagaagaacatcacgctgggggagccccctgggttcctgcactcctggtggtgcgtcttctgggacctgtactgcgcggcgcctgacagaagagaggcctgcgagcactccggcgaggccaaggccttccaggactatagtgctgcagccgcccccagccccgttatggggagtatggccccaggtgacacaatggccgcaggctccatggcggctggcttcttccagggcccccccggctcccagccgtccccccacaaccccaacgcccccatgatggggcctcacggtcagcccttcatgtcaccgcgcttcccagggggcccccggcccaccctgcggatgccgagtcagcctcccgcaggcctccctggctcccagcccctcctccctggcgccatggagccctccccacgagcccaggggcatccgagcatgggcggcccaatgcagagggtgacgcctcctcgtggcatggccagcgtggggccccagagctatggaggtggcatgcgacccccacccaactccctcgccggcccaggcctgcctgccatgaacatgggcccaggagttcgtggcccgtgggccagccccagtggaaactcgatcccctactcctcctcatcccccggcagctacaccggacccccaggaggaggtgggccccctggaacacccatcatgcctagccctggagattccaccaactccagcgaaaacatgtacactatcatgaaccccatcgggcagggcgccggcagggctaatttcccgctcggccctggcccggagggccccatggccgccatgagcgcgatggagcctcaccacgtgaacggatccctgggctcgggcgacatggacgggttgccgaagagttcccccggcgccgtggccggcctgagcaacgccccgggcaccccgcgggacgacggcgagatggcggccgccgggaccttcctgcacccgttcccgagcgaaagctactcgccagggatgaccatgagcgtgtgatggggcggcagccccgggcctctctgcgggcctaggcttctgcccagcgcccctgctcagggcgaggggctgaggtcacacctcgggcacctggactcctggccaatcaaggcttgcccagctgggaggccccacacgaaagactcttaccattttattaaaaacgcaaggacctcagagacgttcttttctgtatggacccttcctgccatttgtattttgtcccagagagaaaggctctttggggggcccctctccccaggacgtcagggggtggggcccataaataaatggaagctggttttggtttttggta

SEQ ID NO: 8662 - protein, 385 aa, Homo sapiens; identical to SEQ ID NO: 1232

SEQ ID NO: 8663 - DNA, 622 bp, Homo sapiens
agcccttcatgtcaccgcgcttcccagggggcccccggcccaccctgcggatgccgagtcaggtgagaaagggatgaggggagggcgggcaggagctgggccggggagggagcaccccacactcagtgccgccgcaccccctccgcagcctcccgcaggcctccctggctcccagcccctcctccctggcgccatggagccctccccacgagcccaggggcatccgagcatgggcggcccaatgcagagggtgacgcctcctcgtggcatggccagcgtggggccccagagctatggaggtggcatgcgacccccacccaactccctcgccggcccaggcctgcctgccatgaacatgggcccaggagttcgtggcccgtgggccagccccagtggaaactcgatcccctactcctcctcatcccccggcagctacaccggacccccaggaggaggtgggccccctggaacacccatcatgcctagccctggagattccaccaactccagcgaaaacatgtacactatcatgaaccccatcgggcagggcgccggcagggctaatgtgagtgggggcttgcaggggtgcttctcgaggcggtgaccccacttggggaatggg

SEQ ID NO: 8664 - protein, 176 aa, Homo sapiens
MRGGRAGAGPGREHPTLSAAAPPPQPPAGLPGSQPLLPGAMEPSPRAQGHPSMGGPMQRVTPPRGMASVGPQSYGGGMRPPPNSLAGPGLPAMNMGPGVRGPWASPSGNSIPYSSSSPGSYTGPPGGGGPPGTPIMPSPGDSTNSSENMYTIMNPIGQGAGRANVSGGLQGCFSRR

SEQ ID NO: 8665 - DNA, 628 bp, Homo sapiens
tggagcctcaccacgtgaacggatccctgggctcgggcgacatggacgggttgccgaagagttcccccggcgccgtggccggcctgagcaacgccccgggcaccccgcgggacgacggcgagatggcggccgccgggaccttcctgcacccgttcccgagcgaaagcgtaagcgactgcgtcgactccccccccgcggcggcgtcgggccggaggggctggcgggcaggccccggcggggcggccggggggccagagcaagaccgtgaccgcggcgggccagtactcgccagggatgaccatgagcgtgtgatggggcggcagccccgggcctctctgcgggcctaggcttctgcccagcgcccctgctcagggcgaggggctgaggtcacacctcgggcacctggactcctggccaatcaaggcttgcccagctgggaggccccacacgaaagactcttaccattttattaaaaacgcaaggacctcagagacgttcttttctgtatggacccttcctgccatttgtattttgtcccagagagaaaggctctttggggggcccctctccccaggacgtcagggggtggggcccataaataaatggaagctggttttggtttttggta

SEQ ID NO: 8666 - protein, 101 aa, Homo sapiens
MDGLPKSSPGAVAGLSNAPGTPRDDGEMAAAGTFLHPFPSESVSDCVDSPPAAASGRRGWRAGPGGAAGGPEQDRDRGGPVLARDDHERVMGRQPRASLRA

SEQ ID NO: 8667 - DNA, 826 bp, Homo sapiens
gttgccttccgggcccgtgcgctccctggctgcttccccctgccgtcagcccgcctgccgggtggaggcgtctagtggcgtcctgagccccccgggggccgctcagtgacaggggctgccccgagctggagggggatccagcgaccaaaccagaggatgcactgaccgcccctcccccccaggcccaaccctccacctggcctcagtcccggggttcctggcgggctgtgcggggcgggggcgcgtcggcgggggcagcttgcgagggtcgttggcccctggaggccgaggggcatggcgccagcacgtctgagccggtgcccgtgtctgtccgtgtctgtaggctcgggcgacatggacgggttgccgaagagttcccccggcgccgtggccggcctgagcaacgccccgggcaccccgcgggacgacggcgagatggcggccgccgggaccttcctgcacccgttcccgagcgaaagctactcgccagggatgaccatgagcgtgtgatggggcggcagccccgggcctctctgcgggcctaggcttctgcccagcgcccctgctcagggcgaggggctgaggtcacacctcgggcacctggactcctggccaatcaaggcttgcccagctgggaggccccacacgaaagactcttaccattttattaaaaacgcaaggacctcagagacgttcttttctgtatggacccttcctgccatttgtattttgtcccagagagaaaggctctttggggggcccctctccccaggacgtcagggggtggggcccataaataaatggaagctggttttggtttttggta

SEQ ID NO: 8668 - protein, 71 aa, Homo sapiens
MAPARLSRCPCLSVSVGSGDMDGLPKSSPGAVAGLSNAPGTPRDDGEMAAAGTFLHPFPSESYSPGMTMSV

SEQ ID NO: 8669 - DNA, 3201 bp, Homo sapiens
gactttgtcccccgagatggatgggggcggacatggggagccaggggatgggactgcctggtaggtgctgctgcccacgaagggggagtaggtggcagtgtggctccgaggagattctggctttggagttctggtcctctgcctgtttcccctgcagtgtctctgacccagaccccctacctacccccccggaggcccagcttccctgcccagctccaccccctggcttgtggctgggctcatgtgtagcctcattgtcctcttgtaaaggggggataggcagccatgagcccctgggggctgcggagcgagcgaggtgaacctatacgcgccgcgctcgtggacgcctggccacttccgccaggcggggacccgatggccacggtggctctgggttgtcgggcctcgaaccgggtctccagacgttgggcccctccctcccagcgcgggagaggcggggaagggggcggggcgggggaggggccgcagcgcttttctccggaggtcgcgcgcccgagagcccgcgctgtccgccgccgctgcctgagtcgactctgcgccgcccgccgcgatggaggccgccgcccagttcttcgtcgagagcccggacgtggtctacggccccgaggccatcgaggcgcaatacgagtaccggacgacgcgcgtcagccgcgagggtggcgttctcaaggtgcaccccacgtccacgcgcttcaccttccggaccgcccggcaggtgccccggctcggggtcatgcttgtcggctggggcgggaacaacggctccacactcaccgccgcggtgctggccaatcgactgcgtttgtcctggcccacgcgcagcggccgcaaggaggccaactactacggctcgctgactcaggcgggcaccgtgagcctgggcctggacgccgagggccaggaggtgttcgtacccttcagcgcggtgctgcccatggtggcgcccaacgacctcgtgttcgatggctgggacatctcgtcgctgaacctggccgaggcgatgcggcgcgcgaaggtgctggactgggggctgcaggagcaactgtggccgcacatggaggccctgcggccccggccttctgtttacatccccgaattcatcgcggccaaccagagcgcgcgcgcggacaacctcatcccaggctcgcgtgcgcagcagctggagcagatccgcagggacatccgagacttccggtctagcgcggggctggacaaagtcatagtgctgtggacggcgaacacggagcgcttctgtgaggtgattccaggcctcaacgacacagccgagaacctgctgcgcaccattgagctcggtctggaggtgtcgccctccacgctcttcgccgtggccagcatcctggagggctgtgccttcctcaatgggtctccgcagaacaccctggtgcccggagctcttgagctcgcgtggcagcaccgggtttttgtgggcggagatgacttcaagtcaggccagaccaaagtcaagtccgtgcttgtggacttcctcattggctccggcctcaagaccatgtccatcgtgagttacaaccacctgggcaacaacgatggggagaacctatcggcgccattgcagttccgctctaaggaggtgtccaagagcaacgtggtggacgacatggtgcagagcaacccagtgctctatacgcccggcgaagagcctgaccactgcgtggtcatcaagtatgtgccgtacgtgggtgacagcaagcgcgcgctggatgagtatacctcggagctgatgctgggcggaaccaacacactggtgctgcacaacacgtgtgaggactcgctgctggccgcacccatcatgctggacctagcgctgctgaccgagctgtgccagcgcgtgagcttctgcactgacatggaccccgagccgcagaccttccaccccgtgctgtccctgctcagcttcctcttcaaggcgccactagtgccgcccggcagcccggtggtcaatgcgcttttccgccagcgcagctgcatcgagaacatcctcagggcctgcgtggggctcccgccacagaaccacatgctcctggaacacaaaatggagcgcccagggcccagcctcaagcgagttggacccgtggctgccacctaccctatgttgaacaagaaaggaccggtacccgctgccaccaatggctgcaccggtgatgccaatgggcatctgcaagaggagcccccaatgcccaccacctgaggccccggtcacacagtttctcggctcttcctccccgctgccccccacgaccctaccttgaaggcccccacaaataaaggcgctgccactcagccctccttccacctggggttcttggggcctgtgacctgactctgcctccctctacttccccgactcttgagcgcccagcttcagtcccatcccctctgcccatggtcatcaccccaactcccagggagagcccagaacctggagcctcgctctgcccccagttctcaaaggtggggctagatgggggcggggacggaacaagaccacagggtggagagtgtggtggcagaaggccaaagagggaatctgagacaagctaccaaaaaccaaaaccagcttccatttatttatgggccccaccccctgacgtcctggggagaggggccccccaaagagcctttctctctgggacaaaatacaaatggcaggaagggtccatacagaaaagaacgtctctgaggtccttgcgtttttaataaaatggtaagagtctttcgtgtggggcctcccagctgggcaagccttgattggccaggagtccaggtgcccgaggtgtgacctcagcccctcgccctgagcaggggcgctgggcagaagcctaggcccgcagagaggcccggggctgccgccccatcacacgctcatggtcatccctggcgagtactgcggagagaggagggggcagcgcgcaggggccgagttcagctccggaagaggctgggacccgcccccagggacaatgggggacagggcagggctgggtcctgggcagacatggggtggggacaggagggaacgggggaggggcgatgcatgggaaggccgccctggggcgcgggtcccggggtgggggcggatgggatcgggacggtgaaataggagcgggaggtggtggggggtggggagaggttgaggagagg

SEQ ID NO: 8670 - protein, 558 aa, Homo sapiens; identical to SEQ ID NO: 1234

SEQ ID NO: 8671 - DNA, 3010 bp, Homo sapiens
gactttgtcccccgagatggatgggggcggacatggggagccaggggatgggactgcctggtaggtgctgctgcccacgaagggggagtaggtggcagtgtggctccgaggagattctggctttggagttctggtcctctgcctgtttcccctgcagtgtctctgacccagaccccctacctacccccccggaggcccagcttccctgcccagctccaccccctggcttgtggctgggctcatgtgtagcctcattgtcctcttgtaaaggggggataggcagccatgagcccctgggggctgcggagcgagcgaggtgaacctatacgcgccgcgctcgtggacgcctggccacttccgccaggcggggacccgatggccacggtggctctgggttgtcgggcctcgaaccgggtctccagacgttgggcccctccctcccagcgcgggagaggcggggaagggggcggggcgggggaggggccgcagcgcttttctccggaggtcgcgcgcccgagagcccgcgctgtccgccgccgctgcctgagtcgactctgcgccggtgagtgcggttcggggcagggacggcctccgtggggacccaggctggcttggccccggccgcttagagtccccgctgaccccctgctcaccccgggcccccagcccgccgcgatggaggccgccgcccagttcttcgtcgagagcccggacgtggtctacggccccgaggccatcgaggcgcaatacgagtaccggacgacgcgcgtcagccgcgagggtggcgttctcaaggctgggacatctcgtcgctgaacctggccgaggcgatgcggcgcgcgaaggtgctggactgggggctgcaggagcaactgtggccgcacatggaggccctgcggccccggccttctgtttacatccccgaattcatcgcggccaaccagagcgcgcgcgcggacaacctcatcccaggctcgcgtgcgcagcagctggagcagatccgcagggacatccgagacttccggtctagcgcggggctggacaaagtcatagtgctgtggacggcgaacacggagcgcttctgtgaggtgattccaggcctcaacgacacagccgagaacctgctgcgcaccattgagctcggtctggaggtgtcgccctccacgctcttcgccgtggccagcatcctggagggctgtgccttcctcaatgggtctccgcagaacaccctggtgcccggagctcttgagctcgcgtggcagcaccgggtttttgtgggcggagatgacttcaagtcaggccagaccaaagtcaagtccgtgcttgtggacttcctcattggctccggcctcaagaccatgtccatcgtgagttacaaccacctgggcaacaacgatggggagaacctatcggcgccattgcagttccgctctaaggaggtgtccaagagcaacgtggtggacgacatggtgcagagcaacccagtgctctatacgcccggcgaagagcctgaccactgcgtggtcatcaagtatgtgccgtacgtgggtgacagcaagcgcgcgctggatgagtatacctcggagctgatgctgggcggaaccaacacactggtgctgcacaacacgtgtgaggactcgctgctggccgcacccatcatgctggacctagcgctgctgaccgagctgtgccagcgcgtgagcttctgcactgacatggaccccgagccgcagaccttccaccccgtgctgtccctgctcagcttcctcttcaaggcgccactagtgccgcccggcagcccggtggtcaatgcgcttttccgccagcgcagctgcatcgagaacatcctcagggcctgcgtggggctcccgccacagaaccacatgctcctggaacacaaaatggagcgcccagggcccagcctcaagcgagttggacccgtggctgccacctaccctatgttgaacaagaaaggaccggtacccgctgccaccaatggctgcaccggtgatgccaatgggcatctgcaagaggagcccccaatgcccaccacctgaggccccggtcacacagtttctcggctcttcctccccgctgccccccacgaccctaccttgaaggcccccacaaataaaggcgctgccactcagccctccttccacctggggttcttggggcctgtgacctgactctgcctccctctacttccccgactcttgagcgcccagcttcagtcccatcccctctgcccatggtcatcaccccaactcccagggagagcccagaacctggagcctcgctctgcccccagttctcaaaggtggggctagatgggggcggggacggaacaagaccacagggtggagagtgtggtggcagaaggccaaagagggaatctgagacaagctaccaaaaaccaaaaccagcttccatttatttatgggccccaccccctgacgtcctggggagaggggccccccaaagagcctttctctctgggacaaaatacaaatggcaggaagggtccatacagaaaagaacgtctctgaggtccttgcgtttttaataaaatggtaagagtctttcgtgtggggcctcccagctgggcaagccttgattggccaggagtccaggtgcccgaggtgtgacctcagcccctcgccctgagcaggggcgctgggcagaagcctaggcccgcagagaggcccggggctgccgccccatcacacgctcatggtcatccctggcgagtactgcggagagaggagggggcagcgcgcaggggccgagttcagctccggaagaggctgggacccgcccccagggacaatgggggacagggcagggctgggtcctgggcagacatggggtggggacaggagggaacgggggaggggcgatgcatgggaaggccgccctggggcgcgggtcccggggtgggggcggatgggatcgggacggtgaaataggagcgggaggtggtggggggtggggagaggttgaggagagg

SEQ ID NO: 8672 - protein, 408 aa, Homo sapiens
MRRAKVLDWGLQEQLWPHMEALRPRPSVYIPEFIAANQSARADNLIPGSRAQQLEQIRRDIRDFRSSAGLDKVIVLWTANTERFCEVIPGLNDTAENLLRTIELGLEVSPSTLFAVASILEGCAFLNGSPQNTLVPGALELAWQHRVFVGGDDFKSGQTKVKSVLVDFLIGSGLKTMSIVSYNHLGNNDGENLSAPLQFRSKEVSKSNVVDDMVQSNPVLYTPGEEPDHCVVIKYVPYVGDSKRALDEYTSELMLGGTNTLVLHNTCEDSLLAAPIMLDLALLTELCQRVSFCTDMDPEPQTFHPVLSLLSFLFKAPLVPPGSPVVNALFRQRSCIENILRACVGLPPQNHMLLEHKMERPGPSLKRVGPVAATYPMLNKKGPVPAATNGCTGDANGHLQEEPPMPTT

SEQ ID NO: 8673 - DNA, 3039 bp, Homo sapiens
gactttgtcccccgagatggatgggggcggacatggggagccaggggatgggactgcctggtaggtgctgctgcccacgaagggggagtaggtggcagtgtggctccgaggagattctggctttggagttctggtcctctgcctgtttcccctgcagtgtctctgacccagaccccctacctacccccccggaggcccagcttccctgcccagctccaccccctggcttgtggctgggctcatgtgtagcctcattgtcctcttgtaaaggggggataggcagccatgagcccctgggggctgcggagcgagcgaggtgaacctatacgcgccgcgctcgtggacgcctggccacttccgccaggcggggacccgatggccacggtggctctgggttgtcgggcctcgaaccgggtctccagacgttgggcccctccctcccagcgcgggagaggcggggaagggggcggggcgggggaggggccgcagcgcttttctccggaggtcgcgcgcccgagagcccgcgctgtccgccgccgctgcctgagtcgactctgcgccgcccgccgcgatggaggccgccgcccagttcttcgtcgagagcccggacgtggtctacggccccgaggccatcgaggcgcaatacgagtaccggacgacgcgcgtcagccgcgagggtggcgttctcaaggaggccaactactacggctcgctgactcaggcgggcaccgtgagcctgggcctggacgccgagggccaggaggtgttcgtacccttcagcgcggtgctgcccatggtggcgcccaacgacctcgtgttcgatggctgggacatctcgtcgctgaacctggccgaggcgatgcggcgcgcgaaggtgctggactgggggctgcaggagcaactgtggccgcacatggaggccctgcggccccggccttctgtttacatccccgaattcatcgcggccaaccagagcgcgcgcgcggacaacctcatcccaggctcgcgtgcgcagcagctggagcagatccgcagggacatccgagacttccggtctagcgcggggctggacaaagtcatagtgctgtggacggcgaacacggagcgcttctgtgaggtgattccaggcctcaacgacacagccgagaacctgctgcgcaccattgagctcggtctggaggtgtcgccctccacgctcttcgccgtggccagcatcctggagggctgtgccttcctcaatgggtctccgcagaacaccctggtgcccggagctcttgagctcgcgtggcagcaccgggtttttgtgggcggagatgacttcaagtcaggccagaccaaagtcaagtccgtgcttgtggacttcctcattggctccggcctcaagaccatgtccatcgtgagttacaaccacctgggcaacaacgatggggagaacctatcggcgccattgcagttccgctctaaggaggtgtccaagagcaacgtggtggacgacatggtgcagagcaacccagtgctctatacgcccggcgaagagcctgaccactgcgtggtcatcaagtatgtgccgtacgtgggtgacagcaagcgcgcgctggatgagtatacctcggagctgatgctgggcggaaccaacacactggtgctgcacaacacgtgtgaggactcgctgctggccgcacccatcatgctggacctagcgctgctgaccgagctgtgccagcgcgtgagcttctgcactgacatggaccccgagccgcagaccttccaccccgtgctgtccctgctcagcttcctcttcaaggcgccactagtgccgcccggcagcccggtggtcaatgcgcttttccgccagcgcagctgcatcgagaacatcctcagggcctgcgtggggctcccgccacagaaccacatgctcctggaacacaaaatggagcgcccagggcccagcctcaagcgagttggacccgtggctgccacctaccctatgttgaacaagaaaggaccggtacccgctgccaccaatggctgcaccggtgatgccaatgggcatctgcaagaggagcccccaatgcccaccacctgaggccccggtcacacagtttctcggctcttcctccccgctgccccccacgaccctaccttgaaggcccccacaaataaaggcgctgccactcagccctccttccacctggggttcttggggcctgtgacctgactctgcctccctctacttccccgactcttgagcgcccagcttcagtcccatcccctctgcccatggtcatcaccccaactcccagggagagcccagaacctggagcctcgctctgcccccagttctcaaaggtggggctagatgggggcggggacggaacaagaccacagggtggagagtgtggtggcagaaggccaaagagggaatctgagacaagctaccaaaaaccaaaaccagcttccatttatttatgggccccaccccctgacgtcctggggagaggggccccccaaagagcctttctctctgggacaaaatacaaatggcaggaagggtccatacagaaaagaacgtctctgaggtccttgcgtttttaataaaatggtaagagtctttcgtgtggggcctcccagctgggcaagccttgattggccaggagtccaggtgcccgaggtgtgacctcagcccctcgccctgagcaggggcgctgggcagaagcctaggcccgcagagaggcccggggctgccgccccatcacacgctcatggtcatccctggcgagtactgcggagagaggagggggcagcgcgcaggggccgagttcagctccggaagaggctgggacccgcccccagggacaatgggggacagggcagggctgggtcctgggcagacatggggtggggacaggagggaacgggggaggggcgatgcatgggaaggccgccctggggcgcgggtcccggggtgggggcggatgggatcgggacggtgaaataggagcgggaggtggtggggggtggggagaggttgaggagagg

SEQ ID NO: 8674 - protein, 504 aa, Homo sapiens
MEAAAQFFVESPDVVYGPEAIEAQYEYRTTRVSREGGVLKEANYYGSLTQAGTVSLGLDAEGQEVFVPFSAVLPMVAPNDLVFDGWDISSLNLAEAMRRAKVLDWGLQEQLWPHMEALRPRPSVYIPEFIAANQSARADNLIPGSRAQQLEQIRRDIRDFRSSAGLDKVIVLWTANTERFCEVIPGLNDTAENLLRTIELGLEVSPSTLFAVASILEGCAFLNGSPQNTLVPGALELAWQHRVFVGGDDFKSGQTKVKSVLVDFLIGSGLKTMSIVSYNHLGNNDGENLSAPLQFRSKEVSKSNVVDDMVQSNPVLYTPGEEPDHCVVIKYVPYVGDSKRALDEYTSELMLGGTNTLVLHNTCEDSLLAAPIMLDLALLTELCQRVSFCTDMDPEPQTFHPVLSLLSFLFKAPLVPPGSPVVNALFRQRSCIENILRACVGLPPQNHMLLEHKMERPGPSLKRVGPVAATYPMLNKKGPVPAATNGCTGDANGHLQEEPPMPTT

SEQ ID NO: 8675 - DNA, 709 bp, Homo sapiens
cggcgaggggtggcagggacccgggcaaactcctgctgcactccaggtggtcatcaagtatgtgccgtacgtgggtgacagcaagcgcgcgctggatgagtatacctcggagctgatgctgggcggaaccaacacactggtgctgcacaacacgtgtgaggactcgctgctggccgcacccatcatgctggacctagcgctgctgaccgagctgtgccagcgcgtgagcttctgcactgacatggaccccgagccgcagaccttccaccccgtgctgtccctgctcagcttcctcttcaaggcgccactagtgccgcccggcagcccggtggtcaatgcgcttttccgccagcgcagctgcatcgagaacatcctcagggcctgcgtggggctcccgccacagaaccacatgctcctggaacacaaaatggagcgcccagggcccagcctcaagcgagttggacccgtggctgccacctaccctatgttgaacaagaaaggaccggtacccgctgccaccaatggctgcaccggtgatgccaatgggcatctgcaagaggagcccccaatgcccaccacctgaggccccggtcacacagtttctcggctcttcctccccgctgccccccacgaccctaccttgaaggcccccacaaataaaggcgctgccactcagccctccttccacctggggttcttggggcctgtg

SEQ ID NO: 8676 - protein, 155 aa, Homo sapiens
MLGGTNTLVLHNTCEDSLLAAPIMLDLALLTELCQRVSFCTDMDPEPQTFHPVLSLLSFLFKAPLVPPGSPVVNALFRQRSCIENILRACVGLPPQNHMLLEHKMERPGPSLKRVGPVAATYPMLNKKGPVPAATNGCTGDANGHLQEEPPMPTT

SEQ ID NO: 8677 - DNA, 1725 bp, Homo sapiens
gggagtcttacaggggcggagcttaaggtgccggaggtctcaggggaggggcctgggggcagcggcttccgtcctggctgtgagcctggaactgaaaaatgcccgaaagtggggcggggcttgagagtctaggtggggcccaggccgggtcgcggccctttcaccactcccacccgtcacctcgccgtgtctgctgacccccaggaggccaactactacggctcgctgactcaggcgggcaccgtgagcctgggcctggacgccgagggccaggaggtgttcgtacccttcagcgcggtgctgcccatggtggcgcccaacgacctcgtgttcgatggctgggacatctcgtcgctgaacctggccgaggcgatgcggcgcgcgaaggtgctggactgggggctgcaggagcaactgtggccgcacatggaggccctgcggccccggccttctgtttacatccccgaattcatcgcggccaaccagagcgcgcgcgcggacaacctcatcccaggctcgcgtgcgcagcagctggagcagatccgcagggacatccgagacttccggtctagcgcggggctggacaaagtcatagtgctgtggacggcgaacacggagcgcttctgtgaggtgattccaggcctcaacgacacagccgagaacctgctgcgcaccattgagctcggtctggaggtgtcgccctccacgctcttcgccgtggccagcatcctggagggctgtgccttcctcaatgggtctccgcagaacaccctggtgcccggagctcttgagctcgcgtggcagcaccgggtttttgtgggcggagatgacttcaagtcaggccagaccaaagtcaagtccgtgcttgtggacttcctcattggctccggcctcaagaccatgtccatcgtgagttacaaccacctgggcaacaacgatggggagaacctatcggcgccattgcagttccgctctaaggaggtgtccaagagcaacgtggtggacgacatggtgcagagcaacccagtgctctatacgcccggcgaagagcctgaccactgcgtggtcatcaagtatgtgccgtacgtgggtgacagcaagcgcgcgctggatgagtatacctcggagctgatgctgggcggaaccaacacactggtgctgcacaacacgtgtgaggactcgctgctggccgcacccatcatgctggacctagcgctgctgaccgagctgtgccagcgcgtgagcttctgcactgacatggaccccgagccgcagaccttccaccccgtgctgtccctgctcagcttcctcttcaaggcgccactagtgccgcccggcagcccggtggtcaatgcgcttttccgccagcgcagctgcatcgagaacatcctcagggcctgcgtggggctcccgccacagaaccacatgctcctggaacacaaaatggagcgcccagggcccagcctcaagcgagttggacccgtggctgccacctaccctatgttgaacaagaaaggaccggtacccgctgccaccaatggctgcaccggtgatgccaatgggcatctgcaagaggagcccccaatgcccaccacctgaggccccggtcacacagtttctcggctcttcctccccgctgccccccacgaccctaccttgaaggcccccacaaataaaggcgctgccactcagccctccttccacctggggttcttggggcctgtg

SEQ ID NO: 8678 - protein, 430 aa, Homo sapiens
MVAPNDLVFDGWDISSLNLAEAMRRAKVLDWGLQEQLWPHMEALRPRPSVYIPEFIAANQSARADNLIPGSRAQQLEQIRRDIRDFRSSAGLDKVIVLWTANTERFCEVIPGLNDTAENLLRTIELGLEVSPSTLFAVASILEGCAFLNGSPQNTLVPGALELAWQHRVFVGGDDFKSGQTKVKSVLVDFLIGSGLKTMSIVSYNHLGNNDGENLSAPLQFRSKEVSKSNVVDDMVQSNPVLYTPGEEPDHCVVIKYVPYVGDSKRALDEYTSELMLGGTNTLVLHNTCEDSLLAAPIMLDLALLTELCQRVSFCTDMDPEPQTFHPVLSLLSFLFKAPLVPPGSPVVNALFRQRSCIENILRACVGLPPQNHMLLEHKMERPGPSLKRVGPVAATYPMLNKKGPVPAATNGCTGDANGHLQEEPPMPTT

SEQ ID NO: 8679 - DNA, 2374 bp, Homo sapiens
gactttgtcccccgagatggatgggggcggacatggggagccaggggatgggactgcctggtaggtgctgctgcccacgaagggggagtaggtggcagtgtggctccgaggagattctggctttggagttctggtcctctgcctgtttcccctgcagtgtctctgacccagaccccctacctacccccccggaggcccagcttccctgcccagctccaccccctggcttgtggctgggctcatgtgtagcctcattgtcctcttgtaaaggggggataggcagccatgagcccctgggggctgcggagcgagcgaggtgaacctatacgcgccgcgctcgtggacgcctggccacttccgccaggcggggacccgatggccacggtggctctgggttgtcgggcctcgaaccgggtctccagacgttgggcccctccctcccagcgcgggagaggcggggaagggggcggggcgggggaggggccgcagcgcttttctccggaggtcgcgcgcccgagagcccgcgctgtccgccgccgctgcctgagtcgactctgcgccgcccgccgcgatggaggccgccgcccagttcttcgtcgagagcccggacgtggtctacggccccgaggccatcgaggcgcaatacgagtaccggacgacgcgcgtcagccgcgagggtggcgttctcaaggtgcaccccacgtccacgcgcttcaccttccggaccgcccggcaggtgccccggctcggggtcatgcttgtcggctggggcgggaacaacggctccacactcaccgccgcggtgctggccaatcgactgcgtttgtcctggcccacgcgcagcggccgcaaggaggccaactactacggctcgctgactcaggcgggcaccgtgagcctgggcctggacgccgagggccaggaggtgttcgtacccttcagcgcggtgctgcccatggtggcgcccaacgacctcgtgttcgatggctgggacatctcgtcgctgaacctggccgaggcgatgcggcgcgcgaaggtgctggactgggggctgcaggagcaactgtggccgcacatggaggccctgcggccccggccttctgtttacatccccgaattcatcgcggccaaccagagcgcgcgcgcggacaacctcatcccaggctcgcgtgcgcagcagctggagcagatccgcagggacatccgagacttccggtctagcgcggggctggacaaagtcatagtgctgtggacggcgaacacggagcgcttctgtgaggtgattccaggcctcaacgacacagccgagaacctgctgcgcaccattgagctcggtctggaggtgtcgccctccacgctcttcgccgtggccagcatcctggagggctgtgccttcctcaatgggtctccgcagaacaccctggtgcccggagctcttgagctcgcgtggcagcaccgggtttttgtgggcggagatgacttcaagtcaggccagaccaaagtcaagtccgtgcttgtggacttcctcattggctccggcctcaagaccatgtccatcgtgagttacaaccacctgggcaacaacgatggggagaacctatcggcgccattgcagttccgctctaaggaggtgtccaagagcaacgtggtggacgacatggtgcagagcaacccagtgctctatacgcccggcgaagagcctgaccactgcgtggtcatcaagtatgtgccgtacgtgggtgacagcaagcgcgcgctggatgagtatacctcggagctgatgctgggcggaaccaacacactggtgctgcacaacacgtgtgaggactcgctgctggccgcacccatcatgctggacctagcgctgctgaccgagctgtgccagcgcgtgagcttctgcactgacatggaccccgagccgcagaccttccaccccgtgctgtccctgctcagcttcctcttcaaggcgccactagtgccgcccggcagcccggtggtcaatgcgcttttccgccagcgcagctgcatcgagaacatcctcagggcctgcgtggggctcccgccacagaaccacatgctcctggaacacaaaatggagcgcccagggcccagcctcaagcgagttggacccgtggctgccacctaccctatgttgaacaagaaaggaccggtacccgctgccaccaatggctgcaccggtgatgccaatgggcatctgcaagaggagcccccaatgcccaccacctgaggccccggtcacacagtttctcggctcttcctccccgctgccccccacgaccctaccttgaaggcccccacaaataaaggcgctgccactcagccctccttccacctggggttcttggggcctgtg

SEQ ID NO: 8680 - protein, 558 aa, Homo sapiens; identical to SEQ ID NO: 1234

SEQ ID NO: 8681 - DNA, 2212 bp, Homo sapiens
gactttgtcccccgagatggatgggggcggacatggggagccaggggatgggactgcctggtaggtgctgctgcccacgaagggggagtaggtggcagtgtggctccgaggagattctggctttggagttctggtcctctgcctgtttcccctgcagtgtctctgacccagaccccctacctacccccccggaggcccagcttccctgcccagctccaccccctggcttgtggctgggctcatgtgtagcctcattgtcctcttgtaaaggggggataggcagccatgagcccctgggggctgcggagcgagcgaggtgaacctatacgcgccgcgctcgtggacgcctggccacttccgccaggcggggacccgatggccacggtggctctgggttgtcgggcctcgaaccgggtctccagacgttgggcccctccctcccagcgcgggagaggcggggaagggggcggggcgggggaggggccgcagcgcttttctccggaggtcgcgcgcccgagagcccgcgctgtccgccgccgctgcctgagtcgactctgcgccgcccgccgcgatggaggccgccgcccagttcttcgtcgagagcccggacgtggtctacggccccgaggccatcgaggcgcaatacgagtaccggacgacgcgcgtcagccgcgagggtggcgttctcaaggaggccaactactacggctcgctgactcaggcgggcaccgtgagcctgggcctggacgccgagggccaggaggtgttcgtacccttcagcgcggtgctgcccatggtggcgcccaacgacctcgtgttcgatggctgggacatctcgtcgctgaacctggccgaggcgatgcggcgcgcgaaggtgctggactgggggctgcaggagcaactgtggccgcacatggaggccctgcggccccggccttctgtttacatccccgaattcatcgcggccaaccagagcgcgcgcgcggacaacctcatcccaggctcgcgtgcgcagcagctggagcagatccgcagggacatccgagacttccggtctagcgcggggctggacaaagtcatagtgctgtggacggcgaacacggagcgcttctgtgaggtgattccaggcctcaacgacacagccgagaacctgctgcgcaccattgagctcggtctggaggtgtcgccctccacgctcttcgccgtggccagcatcctggagggctgtgccttcctcaatgggtctccgcagaacaccctggtgcccggagctcttgagctcgcgtggcagcaccgggtttttgtgggcggagatgacttcaagtcaggccagaccaaagtcaagtccgtgcttgtggacttcctcattggctccggcctcaagaccatgtccatcgtgagttacaaccacctgggcaacaacgatggggagaacctatcggcgccattgcagttccgctctaaggaggtgtccaagagcaacgtggtggacgacatggtgcagagcaacccagtgctctatacgcccggcgaagagcctgaccactgcgtggtcatcaagtatgtgccgtacgtgggtgacagcaagcgcgcgctggatgagtatacctcggagctgatgctgggcggaaccaacacactggtgctgcacaacacgtgtgaggactcgctgctggccgcacccatcatgctggacctagcgctgctgaccgagctgtgccagcgcgtgagcttctgcactgacatggaccccgagccgcagaccttccaccccgtgctgtccctgctcagcttcctcttcaaggcgccactagtgccgcccggcagcccggtggtcaatgcgcttttccgccagcgcagctgcatcgagaacatcctcagggcctgcgtggggctcccgccacagaaccacatgctcctggaacacaaaatggagcgcccagggcccagcctcaagcgagttggacccgtggctgccacctaccctatgttgaacaagaaaggaccggtacccgctgccaccaatggctgcaccggtgatgccaatgggcatctgcaagaggagcccccaatgcccaccacctgaggccccggtcacacagtttctcggctcttcctccccgctgccccccacgaccctaccttgaaggcccccacaaataaaggcgctgccactcagccctccttccacctggggttcttggggcctgtg

SEQ ID NO: 8682 - protein, 504 aa, Homo sapiens; identical to SEQ ID NO: 8674

SEQ ID NO: 8683 - DNA, 770 bp, Homo sapiens
gactttgtcccccgagatggatgggggcggacatggggagccaggggatgggactgcctggtaggtgctgctgcccacgaagggggagtaggtggcagtgtggctccgaggagattctggctttggagttctggtcctctgcctgtttcccctgcagtgtctctgacccagaccccctacctacccccccggaggcccagcttccctgcccagctccaccccctggcttgtggctgggctcatgtgtagcctcattgtcctcttgtaaaggggggataggcagccatgagcccctgggggctgcggagcgagcgaggtgaacctatacgcgccgcgctcgtggacgcctggccacttccgccaggcggggacccgatggccacggtggctctgggttgtcgggcctcgaaccgggtctccagacgttgggcccctccctcccagcgcgggagaggcggggaagggggcggggcgggggaggggccgcagcgcttttctccggaggtcgcgcgcccgagagcccgcgctgtccgccgccgctgcctgagtcgactctgcgccgcccgccgcgatggaggccgccgcccagttcttcgtcgagagcccggacgtggtctacggccccgaggccatcgaggcgcaatacgagtaccggacgacgcgcgtcagccgcgagggtggcgttctcaaggctgggacatctcgtcgctgaacctggccgaggcgatgcggcgcgcgaaggtgctggactgggggctgcaggagcaact

SEQ ID NO: 8684 - protein, 160 aa, Homo sapiens
MSPWGLRSERGEPIRAALVDAWPLPPGGDPMATVALGCRASNRVSRRWAPPSQRGRGGEGGGAGEGPQRFSPEVARPRARAVRRRCLSRLCAARRDGGRRPVLRREPGRGLRPRGHRGAIRVPDDARQPRGWRSQGWDISSLNLAEAMRRAKVLDWGLQE

SEQ ID NO: 8685 - DNA, 1787 bp, Homo sapiens
ggggaggcaggaccgtgagctgcaggaggttggtgttggccctgggatgttgggacagagatgttatcctgggagaacagcgtggccaggctatgctgggagcagggtacacgctgccccactgggctgcatgacttcccctcccgcgcccctcagattcctgggtggccttagaacttgggccaaggccacggacgggcagggaggccaggccccccccacagctgcaggcccaggacctttgcccacggtcctattcttcggtgttatcgcttactaaatgcaccccttcttgtccttggctggcaggttgagtgttatgttctccatggcccctggctcgttccacctgcaccaccgccgctcccgtcaggccttttccccatccccactagtggcacaggggatgcccctgccccagtgtgggaagaacagggctgcctgcgggcgacacagcaaggtccagctgactctggaggcctcctggagcctgctcggcccttccccggcccggcccggcccaaagagaaaaacaacaacagctattgaaacatgaaggatcagtttcctcggagctctgggaacccgggggtcccaaaggagagagactctcgggcaggggtgggatacactgtgggccctccacagtcagctctttggaagctgtcaggaggcacccctccaccccccagtttagaaaaatagacatctgtatttttgcatttctgttctccctgcctgactgctgatggcagcagtgacccccatgtgatccctgggccctgagtcacagccgccatccaccccccaccacctttccaagtcatggcttcattcagccctaaatgggaacacacgcctcagaccccaccatgccctggggggtccccacatacgcacactcacacacccacacttgcgtggccccccgatgctttgggggacactagactaggcacagcaacagagcagcaattggggtgtctgcagagcctgcacccccagagcaggcagacccatcctcctggctccccagctctgcccatgggtccctggggcctccctgaccccatggcgcccagccctccatcagcccctccctgagtgcaaaccttggcggtggctctgctaagacgaccccaggacccacaagtggacagagggacggagggaggccagcagcatcgagaccacaaggtctcaacagtgtggaatgagcagcagcagcaacaaatgggaaaccgaggacatcgcaaagaaaagtctgacgccgctgcggccgagtctcaacttggagcacagaaacacagtggcccccgacagctgagggcctgaaatagcagggcaggcctgggggcgctgaaagccctctgcccccttggctctgagcagctgtctgggggcaccagctggagttctcaaaatagccacctgggccaccctgtttgcttgctggagcagagaccctgcccaaggaggagaggctggggaaaggggtgcctaaacgtagagccagagaccagcagaggccacctgcccattccccacgccctcagaacgcagctgcacctttcgacgacctctgtaatactgcaggcaggacccagggcagcggctagaccctgggtgtccgaggagagggaggcacaggtttagaaaaaagattttgcttctcttttgtacaaaaatagactcaagtctcattagcagtagctaaaagtggctgtctttgtataaaactagaaaaggcaggcgcgccaccccaagggcctaggagtcttctggcg

SEQ ID NO: 8686 - protein, 91 aa, Homo sapiens
MHPFLSLAGRLSVMFSMAPGSFHLHHRRSRQAFSPSPLVAQGMPLPQCGKNRAACGRHSKVQLTLEASWSLLGPSPARPGPKRKTTTAIET

SEQ ID NO: 8687 - DNA, 487 bp, Homo sapiens
gtgagtgggggcagcggggtgtcccagaggcccttccgtgaccgagtgctgcacctcctggcactacggccctaccgcaaggctgagctgcctgggaaccagtccaaggggctgtcagttgaatttgcctttttgttgttgttgttgtttttgttgtttatttgttctccttttaaggaattatgaagctaagaaaagttttgtgttttgggggttggtggacaaagttctagctgattaaatatggtctaacttattgatactatttttttttcttttaatgttgtactgtggagaaaaactattttgagccatggggttggtgtttacaagaactttccacttttgccaaaatgttacaattgaaaggcatctatctgcgtcttcagtttcctgatattttcttaaaagatctagtgtcctttttgtacactaaacaggtgaatgctgacttttttcattctccaataaatttcactgaactgaa

SEQ ID NO: 8688 - protein, 43 aa, Homo sapiens
MLQLKGIYLRLQFPDIFLKDLVSFLYTKQVNADFFHSPINFTE

SEQ ID NO: 8689 - DNA, 1008 bp, Homo sapiens
agcggctgcagcctcctgatttcatcgaccccctagccaacaagaaaccccggatatcgcagcaagtgtgggtgtgtgagtgtgcgtatgtggggaccccccagggcatggtggggtctgaggcgtgtgttcccatttagggctgaatgaagccatgacttggaaaggtggtggggggtggatggcggctgtgactcagggcccagggatcacatgggggtcactgctgccatcagcagtcaggcagggagaacagaaatgcaaaaatacagatgtctatttttctaaactggggggtggaggggtgcctcctgacagcttccaaagagctgactgtggagggcccacagtgtatcccacccctgcccgagagtctctctcctttgggacccccgggttcccagagctccgaggaaactgatccttcatgtttcaatagctgttgttgtttttctctttgggccgggccgggccggggaagggccgagcaggctccaggaggcctccagagtcagctggaccttgctgtgtcgcccgcaggcagccctgcagacaccggtgaggtgggatgatttcaggaggtcccagcccgggactgcccgcccctctgccctgggaaccagtccaaggggctgtcagttgaatttgcctttttgttgttgttgttgtttttgttgtttatttgttctccttttaaggaattatgaagctaagaaaagttttgtgttttgggggttggtggacaaagttctagctgattaaatatggtctaacttattgatactatttttttttcttttaatgttgtactgtggagaaaaactattttgagccatggggttggtgtttacaagaactttccacttttgccaaaatgttacaattgaaaggcatctatctgcgtcttcagtttcctgatattttcttaaaagatctagtgtcctttttgtacactaaacaggtgaatgctgacttttttcattctccaataaatttcactgaactgaa

SEQ ID NO: 8690 - protein, 99 aa, Homo sapiens [sequence omitted]

SEQ ID NO: 8691 - DNA, 4027 bp, Homo sapiens
ggcggggcggggcgtggccggcgtggcggcgctggagccgggaagggggcgcgggggagagatggtcgcaagatggcggcgctgaaggaggataggagctacgggctgtcgtgcgggcgggttagcgacggcagcaaggtgtcggtgttccacgtgaagctcaccgacagtgccctgagggccttcgagagctaccgcgccagacaggattctgtttcactgaggccatctatccgatttcaaggaagccaagggcacatctccatcccccagcctgactgccccgcagaggcgcggacgttctccttctacctctccaacatcggccgcgacaacccccagggcagcttcgactgcatccagcagtatgtctccagtcatggggaagttcacctggactgcctgggcagcatacaggacaagatcacggtgtgtgccaccgacgactcctaccagaaggcgcggcagagcatggcccaggcggaggaggagacgcggagccgaagtgccattgtcatcaaggctggaggccgctacctgggcaagaaggttcagtttcggaaaccagccccaggtgcaacagacgcggtgccctcccggaagcgggcaacccccatcaacttggcgagtgccatcaggaagagtggtgccagtgccgtgagtgggggcagcggggtgtcccagaggcccttccgtgaccgagtgctgcacctcctggcactacggccctaccgcaaggctgagctgctgctgcgactgcagaaggacggcctgacgcaggcggacaaggacgcgctggatggcctcctccagcaggtggccaacatgagtgctaaggacggcacgtgtacactgcaggactgcatgtacaaggatgtgcagaaggactggcctggctactcggagggggaccagcagctgctgaagcgggtgctcgtccggaagctgtgccagccacagagcactggcagcctccttggagaccctgctgcctccagccccccaggcgagcgtgggcgctcggcctcgcccccacagaagcggctgcagcctcctgatttcatcgaccccctagccaacaagaaaccccggatatcgcacttcactcagagagctcagcctgccgtcaacgggaagctgggcgtgcccaatggccgtgaggccttgctgcccaccccgggcccaccagccagcacggacaccctcagctccagcactcacctgcccccgcggctggagcccccgagggcccacgaccccctggccgatgtcagcaatgacctgggccacagcggccgagactgtgagcacggagaggcggctgccccagcccccactgtgcgcctcggcctgcccctgctgacggactgtgcccagcccagcaggccacacggcagcccctcgcgcagcaagcccaagaagaagtccaagaagcacaaagacaaggagagggcggctgaggacaagccccgggcccagcttccagactgtgcacctgccacccatgccacccccggagccccagcagacaccccaggtttaaacggaacctgcagcgtttccagtgttcccacgtccacgtcggagacgcctgactacttgctgaagtacgcagccatctcctcttcggagcagcgccagagctacaagaacgacttcaatgccgagtacagcgagtaccgcgacctgcacgcccgcattgagcgcatcacgcggcggttcacccagctcgacgcccagctccggcagctctcccagggctccgaggagtatgagactactcgagggcagattttgcaggaatatcgaaaaatcaaaaagaccaacaccaactacagccaggagaagcaccgctgcgagtacctgcacagcaagctggcccacatcaagaggctcatcgccgagtacgaccagcggcagctgcaggcttggccctagccgccctccccgatggcggggatctgggagggtcgggggagcaaaaggcggtgagagaggatttatttaaaaaaataaacccgaggaagatgctcatctgagccagcaccgccggctttcagggcagcccctgcagacgtctggccctggcgggtggctgcaagcccacctcggccctccctgcgcttcctgagcagtccctgcttatgatgggctccccaggaagcccactgcctcctccctggctgcagcctccggggttcagcctcctgtctcgccagaagactcctaggcccttggggtggcgcgcctgccttttctagttttatacaaagacagccacttttagctactgctaatgagacttgagtctatttttgtacaaaagagaagcaaaatcttttttctaaacctgtgcctccctctcctcggacacccagggtctagccgctgccctgggtcctgcctgcagtattacagaggtcgtcgaaaggtgcagctgcgttctgagggcgtggggaatgggcaggtggcctctgctggtctctggctctacgtttaggcacccctttccccagcctctcctccttgggcagggtctctgctccagcaagcaaacagggtggcccaggtggctattttgagaactccagctggtgcccccagacagctgctcagagccaagggggcagagggctttcagcgcccccaggcctgccctgctatttcaggccctcagctgtcgggggccactgtgtttctgtgctccaagttgagactcggccgcagcggcgtcagacttttctttgcgatgtcctcggtttcccatttgttgctgctgctgctcattccacactgttgagaccttgtggtctcgatgctgctggcctccctccgtccctctgtccacttgtgggtcctggggtcgtcttagcagagccaccgccaaggtttgcactcagggaggggctgatggagggctgggcgccatggggtcagggaggccccagggacccatgggcagagctggggagccaggaggatgggtctgcctgctctgggggtgcaggctctgcagacaccccaattgctgctctgttgctgtgcctagtctagtgtcccccaaagcatcggggggccacgcaagtgtgggtgtgtgagtgtgcgtatgtggggaccccccagggcatggtggggtctgaggcgtgtgttcccatttagggctgaatgaagccatgacttggaaaggtggtggggggtggatggcggctgtgactcagggcccagggatcacatgggggtcactgctgccatcagcagtcaggcagggagaacagaaatgcaaaaatacagatgtctatttttctaaactggggggtggaggggtgcctcctgacagcttccaaagagctgactgtggagggcccacagtgtatcccacccctgcccgagagtctctctcctttgggacccccgggttcccagagctccgaggaaactgatccttcatgtttcaatagctgttgttgtttttctctttgggccgggccgggccggggaagggccgagcaggctccaggaggcctccagagtcagctggaccttgctgtgtcgcccgcaggcagccctgcagacaccggtgaggtgggatgatttcaggaggtcccagcccgggactgcccgcccctctgccctgggaaccagtccaaggggctgtcagttgaatttgcctttttgttgttgttgttgtttttgttgtttatttgttctccttttaaggaattatgaagctaagaaaagttttgtgttttgggggttggtggacaaagttctagctgattaaatatggtctaacttattgatactatttttttttcttttaatgttgtactgtggagaaaaactattttgagccatggggttggtgtttacaagaactttccacttttgccaaaatgttacaattgaaaggcatctatctgcgtcttcagtttcctgatattttcttaaaagatctagtgtcctttttgtacactaaacaggtgaatgctgacttttttcattctccaataaatttcactgaactgaa

SEQ ID NO: 8692 - protein, 621 aa, Homo sapiens; identical to SEQ ID NO: 1236

SEQ ID NO: 8693 - DNA, 778 bp, Homo sapiens
agcggctgcagcctcctgatttcatcgaccccctagccaacaagaaaccccggatatcgcagcaagtgtgggtgtgtgagtgtgcgtatgtggggaccccccagggcatggtggggtctgaggcgtgtgttcccatttagggctgaatgaagccatgacttggaaaggtggtggggggtggatggcggctgtgactcagggcccagggatcacatgggggtcactgctgccatcagcagtcaggcagggagaacagaaatgcaaaaatacagatgtctatttttctaaactggggggtggaggggtgcctcctgacagcttccaaagagctgactgtggagggcccacagtgtatcccacccctgcccgagagtctctctcctttgggacccccgggttcccagagctccgaggaaactgatccttcatgtttcaatagctgttgttgtttttctctttgggccgggccgggccggggaagggccgagcaggctccaggaggcctccagagtcagctggaccttgctgtgtcgcccgcaggcagccctgcagacaccggtgaggtgggatgatttcaggaggtcccagcccgggactgcccgcccctctgccctgggaaccagtccaaggggctgtcagttgaatttgcctttttgttgttgttgttgtttttgttgtttatttgttctccttttaaggaattatgaagctaagaaaagttttgtgttttgggggttggtggacaaagttctagctgattaaatatggtctaacttat

SEQ ID NO: 8694 - protein, 99 aa, Homo sapiens [sequence omitted]

SEQ ID NO: 8695 - DNA, 3797 bp, Homo sapiens
ggcggggcggggcgtggccggcgtggcggcgctggagccgggaagggggcgcgggggagagatggtcgcaagatggcggcgctgaaggaggataggagctacgggctgtcgtgcgggcgggttagcgacggcagcaaggtgtcggtgttccacgtgaagctcaccgacagtgccctgagggccttcgagagctaccgcgccagacaggattctgtttcactgaggccatctatccgatttcaaggaagccaagggcacatctccatcccccagcctgactgccccgcagaggcgcggacgttctccttctacctctccaacatcggccgcgacaacccccagggcagcttcgactgcatccagcagtatgtctccagtcatggggaagttcacctggactgcctgggcagcatacaggacaagatcacggtgtgtgccaccgacgactcctaccagaaggcgcggcagagcatggcccaggcggaggaggagacgcggagccgaagtgccattgtcatcaaggctggaggccgctacctgggcaagaaggttcagtttcggaaaccagccccaggtgcaacagacgcggtgccctcccggaagcgggcaacccccatcaacttggcgagtgccatcaggaagagtggtgccagtgccgtgagtgggggcagcggggtgtcccagaggcccttccgtgaccgagtgctgcacctcctggcactacggccctaccgcaaggctgagctgctgctgcgactgcagaaggacggcctgacgcaggcggacaaggacgcgctggatggcctcctccagcaggtggccaacatgagtgctaaggacggcacgtgtacactgcaggactgcatgtacaaggatgtgcagaaggactggcctggctactcggagggggaccagcagctgctgaagcgggtgctcgtccggaagctgtgccagccacagagcactggcagcctccttggagaccctgctgcctccagccccccaggcgagcgtgggcgctcggcctcgcccccacagaagcggctgcagcctcctgatttcatcgaccccctagccaacaagaaaccccggatatcgcacttcactcagagagctcagcctgccgtcaacgggaagctgggcgtgcccaatggccgtgaggccttgctgcccaccccgggcccaccagccagcacggacaccctcagctccagcactcacctgcccccgcggctggagcccccgagggcccacgaccccctggccgatgtcagcaatgacctgggccacagcggccgagactgtgagcacggagaggcggctgccccagcccccactgtgcgcctcggcctgcccctgctgacggactgtgcccagcccagcaggccacacggcagcccctcgcgcagcaagcccaagaagaagtccaagaagcacaaagacaaggagagggcggctgaggacaagccccgggcccagcttccagactgtgcacctgccacccatgccacccccggagccccagcagacaccccaggtttaaacggaacctgcagcgtttccagtgttcccacgtccacgtcggagacgcctgactacttgctgaagtacgcagccatctcctcttcggagcagcgccagagctacaagaacgacttcaatgccgagtacagcgagtaccgcgacctgcacgcccgcattgagcgcatcacgcggcggttcacccagctcgacgcccagctccggcagctctcccagggctccgaggagtatgagactactcgagggcagattttgcaggaatatcgaaaaatcaaaaagaccaacaccaactacagccaggagaagcaccgctgcgagtacctgcacagcaagctggcccacatcaagaggctcatcgccgagtacgaccagcggcagctgcaggcttggccctagccgccctccccgatggcggggatctgggagggtcgggggagcaaaaggcggtgagagaggatttatttaaaaaaataaacccgaggaagatgctcatctgagccagcaccgccggctttcagggcagcccctgcagacgtctggccctggcgggtggctgcaagcccacctcggccctccctgcgcttcctgagcagtccctgcttatgatgggctccccaggaagcccactgcctcctccctggctgcagcctccggggttcagcctcctgtctcgccagaagactcctaggcccttggggtggcgcgcctgccttttctagttttatacaaagacagccacttttagctactgctaatgagacttgagtctatttttgtacaaaagagaagcaaaatcttttttctaaacctgtgcctccctctcctcggacacccagggtctagccgctgccctgggtcctgcctgcagtattacagaggtcgtcgaaaggtgcagctgcgttctgagggcgtggggaatgggcaggtggcctctgctggtctctggctctacgtttaggcacccctttccccagcctctcctccttgggcagggtctctgctccagcaagcaaacagggtggcccaggtggctattttgagaactccagctggtgcccccagacagctgctcagagccaagggggcagagggctttcagcgcccccaggcctgccctgctatttcaggccctcagctgtcgggggccactgtgtttctgtgctccaagttgagactcggccgcagcggcgtcagacttttctttgcgatgtcctcggtttcccatttgttgctgctgctgctcattccacactgttgagaccttgtggtctcgatgctgctggcctccctccgtccctctgtccacttgtgggtcctggggtcgtcttagcagagccaccgccaaggtttgcactcagggaggggctgatggagggctgggcgccatggggtcagggaggccccagggacccatgggcagagctggggagccaggaggatgggtctgcctgctctgggggtgcaggctctgcagacaccccaattgctgctctgttgctgtgcctagtctagtgtcccccaaagcatcggggggccacgcaagtgtgggtgtgtgagtgtgcgtatgtggggaccccccagggcatggtggggtctgaggcgtgtgttcccatttagggctgaatgaagccatgacttggaaaggtggtggggggtggatggcggctgtgactcagggcccagggatcacatgggggtcactgctgccatcagcagtcaggcagggagaacagaaatgcaaaaatacagatgtctatttttctaaactggggggtggaggggtgcctcctgacagcttccaaagagctgactgtggagggcccacagtgtatcccacccctgcccgagagtctctctcctttgggacccccgggttcccagagctccgaggaaactgatccttcatgtttcaatagctgttgttgtttttctctttgggccgggccgggccggggaagggccgagcaggctccaggaggcctccagagtcagctggaccttgctgtgtcgcccgcaggcagccctgcagacaccggtgaggtgggatgatttcaggaggtcccagcccgggactgcccgcccctctgccctgggaaccagtccaaggggctgtcagttgaatttgcctttttgttgttgttgttgtttttgttgtttatttgttctccttttaaggaattatgaagctaagaaaagttttgtgttttgggggttggtggacaaagttctagctgattaaatatggtctaacttat

SEQ ID NO: 8696 - protein, 621 aa, Homo sapiens; identical to SEQ ID NO: 1236

SEQ ID NO: 8697 - DNA, 2045 bp, Homo sapiens
ggcggggcggggcgtggccggcgtggcggcgctggagccgggaagggggcgcgggggagagatggtcgcaagatggcggcgctgaaggaggataggagctacgggctgtcgtgcgggcgggttagcgacggcagcaaggtgtcggtgttccacgtgaagctcaccgacagtgccctgagggccttcgagagctaccgcgccagacaggattctgtttcactgaggccatctatccgatttcaaggaagccaagggcacatctccatcccccagcctgactgccccgcagaggcgcggacgttctccttctacctctccaacatcggccgcgacaacccccagggcagcttcgactgcatccagcagtatgtctccagtcatggggaagttcacctggactgcctgggcagcatacaggacaagatcacggtgtgtgccaccgacgactcctaccagaaggcgcggcagagcatggcccaggcggaggaggagacgcggagccgaagtgccattgtcatcaaggctggaggccgctacctgggcaagaaggttcagtttcggaaaccagccccaggtgcaacagacgcggtgccctcccggaagcgggcaacccccatcaacttggcgagtgccatcaggaagagtggtgccagtgccgtgagtgggggcagcggggtgtcccagaggcccttccgtgaccgagtgctgcacctcctggcactacggccctaccgcaaggctgagctgctgctgcgactgcagaaggacggcctgacgcaggcggacaaggacgcgctggatggcctcctccagcaggtggccaacatgagtgctaaggacggcacgtgtacactgcaggactgcatgtacaaggatgtgcagaaggactggcctggctactcggagggggaccagcagctgctgaagcgggtgctcgtccggaagctgtgccagccacagagcactggcagcctccttggagaccctgctgcctccagccccccaggcgagcgtgggcgctcggcctcgcccccacagaagcggctgcagcctcctgatttcatcgaccccctagccaacaagaaaccccggatatcgcacttcactcagagagctcagcctgccgtcaacgggaagctgggcgtgcccaatggccgtgaggccttgctgcccaccccgggcccaccagccagcacggacaccctcagctccagcactcacctgcccccgcggctggagcccccgagggcccacgaccccctggccgatgtcagcaatgacctgggccacagcggccgagactgtgagcacggagaggcggctgccccagcccccactgtgcgcctcggcctgcccctgctgacggactgtgcccagcccagcaggccacacggcagcccctcgcgcagcaagcccaagaagaagtccaagaagcacaaagacaaggagagggcggctgaggacaagccccgggcccagcttccagactgtgcacctgccacccatgccacccccggagccccagcagacaccccaggtttaaacggaacctgcagcgtttccagtgttcccacgtccacgtcggagacgcctgactacttgctgaagtacgcagccatctcctcttcggagcagcgccagagctacaagaacgacttcaatgccgagtacagcgagtaccgcgacctgcacgcccgcattgagcgcatcacgcggcggttcacccagctcgacgcccagctccggcagctctcccagggctccgaggagtatgagactactcgagggcagattttgcaggaatatcgaaaaatcaaaaagaccaacaccaactacagccaggagaagcaccgctgcgagtacctgcacagcaagctggcccacatcaagaggctcatcgccgagtacgaccagcggcagctgcaggcttggccctagccgccctccccgatggcggggatctgggagggtcgggggagcaaaaggcggtgagagaggatttatttaaaaaaataaacccgaggaagatgctcatctgagccagc

SEQ ID NO: 8698 - protein, 621 aa, Homo sapiens; identical to SEQ ID NO: 1236

SEQ ID NO: 8699 - DNA, 670 bp, Homo sapiens
gtcagcaatgacctgggccacagcggccgagactgtgagcacggagaggcggctgccccagcccccactgtgcgcctcggcctgcccctgctgacggactgtgcccagcccagcaggccacacggcagcccctcgcgcagcaagcccaagaagaagtccaagaagcacaaagacaaggagagggcggctgaggacaagccccgggcccagcttccagactgtgcacctgccacccatgccacccccggagccccagcagacaccccaggtttaaacggaacctgcagcgtttccagtgttcccacgtccacgtcggagacgcctgactacttgctgaagtacgcagccatctcctcttcggagcagcgccagagctacaagaacgacttcaatgccgagtacagcgagtaccgcgacctgcacgcccgcattgagcgcatcacgcggcggttcacccagctcgacgcccagctccggcagctctcccagggctccgaggagtatgaggtagagcccccccgctgcctactgtgccctggctctggcgggagccagggcccacttgggcgcgcaccatcgccaccacgagcttggtggccccagagtctggcccttccccaggcagcgcttctccccctggtgcactccatgcagcaaccccatggttctg

SEQ ID NO: 8700 - protein, 39 aa, Homo sapiens
MPSTASTATCTPALSASRGGSPSSTPSSGSSPRAPRSMR

SEQ ID NO: 8701 - DNA, 3217 bp, Homo sapiens
atcatcctgggccctcacctctggcataggctcttggtagtgggggcccagacagggaggcacctgccacctgcttcccttctcagccacccacagccctcatagggcagaatgggactcttgctgatgtagacgccgaagtcgcgggcgctcatggcgggcctggaggtactgttcgcatcggcagcgccggccatcacctgcaggcaggacgcgctcgtctgcttcttgcattgggaagtggtgacacacggttacttcggcttgggtgtcggtgaccagccgggtcccaatgataagaagtcagaactgctgccagctgggtggaacaacaataaagacctgtatgtcctccggtatgagtataaggatgggtccagaaagctccttgtgaaagccatcaccgtggagagcagcatgatcctcaatgtgctggaatatggctcacagcaagtggcagacttgaccctgaacttggatgattatatcgatgcagaacacctgggtgacttccacaggacctacaagaacagtgaggagcttcggtctcgtattgtgtctggaatcatcacacctatccatgagcagtgggaaaaggctaatgtaagcagtccccaccgggagttcccccctgctaccgccagagaggtggacccactccggattcctccacaccacccacacaccagtcggcagcctccctggtgtgatcccctgggcccgtttgttgtcgggggagaagacttagacccttttgggcctcggagaggtggcatgattgtggatcccctgagatctggcttcccaagagcacttattgacccttcctcaggcctcccgaaccgacttcctccaggcgctgtgcccccaggagctcgctttgacccctttggacccattgggaccagcccacccggacctaacccagaccatctccccccgccgggctacgatgacatgtacctgtgaaggcctcaagaatgtaacatcccaggcttccctccattctcctggagctgccaccgctgtccccatcagcaaccatgttcttgcaggctgggggcaagggattctgctcatgtgtttgcagaccggctgggatagcctccccaccccttatcagagccaagacacctgctgcagctctccacctagctgcagatagctcccaaagagaaatcagtgtgtctctttcaccatcagctcctcccctttcaccaccagctcctctccacttcccaagggagactccggcaaccttcagcaacatatatcctcgaccagatgcagtgctataagaacagaacgcattttggatgttattattaagaaccaaatgtcaatacagaattcatgttgccggtttcccacttttctttttacattaatgcatagctgcttccatttatgagactttagagtttgagtttctgtagggctgaatgactctttttcctgcccagggcccattcttgcttctcaggcaccttccgtttattaattgccattgctcctgacatcactaagatgggtccccttctggctgcatgaatggaaatgagtgactggaaatcccataggccacaagaatgactttcacaagggcaggaacattgtggaaagactgcatcattctgatgaggcaaaatcctccagctattcctgtctgggccagttttgtaggtccatctgtgcatgggcagcagtagtcaaaaagccaaggaaaaaacagagcagacctgaaggctaatcttatttttgccactaacttagtgaatgaccctaagcaagttccttctcctcttagggccttgtgccaagcctatgaaattggaggtggctttcctgctctaaagcattttgatgtctcattctgtgtttggtaacccctataaactggggcagaggaaaagaatgatggttcaaggccatacttcccttgaaccttgtgtggttcttgcctaactctgtggtttttggaccccatggggcccagacagagcacaggagcatgggctgcctctgagtgtggtgttgaacttcgggaggagcagggagccctgcaccttgtgtcctggcccacctgacctttggtgttctccggatccttttcagcccgaggcctgacagacgcgggcagtgatgagccctgttctggagtggaaagagcacgatagagcaccaggctaagaggcacgagatcaaggcggtagtcacttccgctctgcagctagcatttcaaccatatgtggatcctttcatttctcagctccctggattccttcccctaaattaggacctattatttacctgtaggtaagcaagctactgtagctcttctgaggtatctgccaggctgttttctgtagcctcagattgcctatctgcttagcctgagaacaggtagatgaaaactaaactgatgcctaggcccagggtcagtctcagatggaagctgggcctgggtggggaggctagcatgcgtggctccctgggtatttctgtcagtccccatggcaagcagtgatttagtaaaacaccccagagtcagggaagccaaccaccttgaaacctttagaacatctctgctttggagaaagacccagagatcaggcagaggtgcagattcaatcattactcataacctttgagagatggcaaatgggaggagtgttagtctttgttttggaattggaccattcttgcaaccaaaaggacttagagcagtttgctcataaagacatcctttattataaaaggaagtatttaaaggatgatagagaccatcagatagaagcagggaaggtagataacttttaggaccttgatgtgaggaaaagataaaatttaaacaataaatttgccacttagattttctagcagcaaagtccgaaaagatagttatatacaaaattctgttttctgaaaacaaaattgtgattcaccttcagaattggccattttttttgtgagtttccttgcatcaaggacactgagaaacacagtcattgtcttaggtgttctatgggaggaagtgaatagagcctttaggaacttcctggtcaagcttatggtgcttattttgatctgggccacttccctccttccagtcatgagtaatcatcaaggagcaagttggagtgtttcaggtgtatattttgtagaacccaaaagattggagccttaacaataaacatcagcactaagtgacctgttc

SEQ ID NO: 8702 - protein, 271 aa, Homo sapiens
MAGLEVLFASAAPAITCRQDALVCFLHWEVVTHGYFGLGVGDQPGPNDKKSELLPAGWNNNKDLYVLRYEYKDGSRKLLVKAITVESSMILNVLEYGSQQVADLTLNLDDYIDAEHLGDFHRTYKNSEELRSRIVSGIITPIHEQWEKANVSSPHREFPPATAREVDPLRIPPHHPHTSRQPPWCDPLGPFVVGGEDLDPFGPRRGGMIVDPLRSGFPRALIDPSSGLPNRLPPGAVPPGARFDPFGPIGTSPPGPNPDHLPPPGYDDMYL

SEQ ID NO: 8703 - DNA, 198 bp, Homo sapiens
cgcgggcacagcgtcctccaagaggccaccttgctgagaggcagacttcccatccacaaaatgggatgacaaaacggctcagagttgaaaccacttctccaaggagacacaactgctgcccgcagagctgaagctcctgacccactatcaaatttcaatcatttatttgcctaccccctttatgatttttaccacccg

SEQ ID NO: 8704 - protein, 42 aa, Homo sapiens
QNGSELKPLLQGDTTAARRAEAPDPLSNFNHLFAYPLYDFYH

SEQ ID NO: 8705 - DNA, 1162 bp, Homo sapiens
gaatattcatcttatttatcctgtatttcatattttaaattatatgcttgtggggcttttatgttggctaggaataaatatacttttaaatggttgtttgctccacttttgcttatacaacttgtattttctaatctttaaaaaataggaacacagcctattggatccctaggctcaatatgtcctaatagttatggaagtgtgaaagatgtgtgcactgcaaaatttggctccaaacatttttttcatcttattcctaatgaagcaacaatctgcagcttgcttctctgcaacagaaatgacactgcctgggatgagctgaagctcacgtgtcagacggcactgcatgtcctgcagttaacactcaaggaaccatgggctttgttgggaggtggctgtactgaaactcatttggctgcatatatcagacacaagactcacaacgacccagaaagcattctcaaagatgatgaatgtactcaaacagaacttcaattaattgctgaagcattttgcagtgccctagaatctgttgttggctctttagaacatgatggaggtgaaattctcactgacatgaagtatggacacctttggtcagttcaggcagattctccctgtgttgctaactggccagatttgctttcacagtgtggctgtggattatacaatagccaggaagaactcaactggtctttcttaagaagcacacgtcgtccatttgtgccacaaagctgccttccacatgaagctgtgggctcagccagcaacctgaccttggactgtttgactgcaaagcttagtggcctacaggtggctgtagagacagccaatttgattttggatctttcatatgttattgaagataaaaactaagagaatagcatgttcgtattacaagagaaacaaataaactagtctgttggcaattgagaaaaattgtgagtgtatttgttttctcccaaagccctgttctacatatttggacaaatgactcataaaattatagatacacttatttaggaaaaaaggtgattcgtgaatggaaatgccatgaaacaataaaaatatgaagcattatttatttaaaaatattatagttatcttagggattctatactggctgctgtacattgttctaaatttttgttatgttggcatc

SEQ ID NO: 8706 - protein, 99 aa, Homo sapiens
MKYGHLWSVQADSPCVANWPDLLSQCGCGLYNSQEELNWSFLRSTRRPFVPQSCLPHEAVGSASNLTLDCLTAKLSGLQVAVETANLILDLSYVIEDKN

SEQ ID NO: 8707 - DNA, 1360 bp, Homo sapiens
gtgccctcgcgcgacgcgaaggttgtcgggatccgcggcagcagcggctgcttgagatctgtttctggggcctctggcggtggcggcctggggcggcgcgacggctggtgcgcaggtacactgatgctgaagtactatgagccttcggaacttgtggagagactacaaagttttggttgttatggtccctttagttgggctcatacatttggggtggtacagaatcaaaagcagccctgttttccaaatacctaaaaacgacgacattcctgagcaagatagtctgggactttcaaatcttcagaagagccaaatccaggggaagtagcaggcttgcaatcttcaggaacacagcctattggatccctaggctcaatatgtcctaatagttatggaagtgtgaaagatgtgtgcactgcaaaatttggctccaaacatttttttcatcttattcctaatgaagcaacaatctgcagcttgcttctctgcaacagaaatgacactgcctgggatgagctgaagctcacgtgtcagacggcactgcatgtcctgcagttaacactcaaggaaccatgggctttgttgggaggtggctgtactgaaactcatttggctgcatatatcagacacaagactcacaacgacccagaaagcattctcaaagatgatgaatgtactcaaacagaacttcaattaattgctgaagcattttgcagtgccctagaatctgttgttggctctttagaacatgatggaggtgaaattctcactgacatgaagtatggacacctttggtcagttcaggcagattctccctgtgttgctaactggccagatttgctttcacagtgtggctgtggattatacaatagccaggaagaactcaactggtctttcttaagaagcacacgtcgtccatttgtgccacaaagctgccttccacatgaagctgtgggctcagccagcaacctgaccttggactgtttgactgcaaagcttagtggcctacaggtggctgtagagacagccaatttgattttggatctttcatatgttattgaagataaaaactaagagaatagcatgttcgtattacaagagaaacaaataaactagtctgttggcaattgagaaaaattgtgagtgtatttgttttctcccaaagccctgttctacatatttggacaaatgactcataaaattatagatacacttatttaggaaaaaaggtgattcgtgaatggaaatgccatgaaacaataaaaatatgaagcattatttatttaaaaatattatagttatcttagggattctatactggctgctgtacattgttctaaatttttgttatgttggcatc

SEQ ID NO: 8708 - protein, 99 aa, Homo sapiens; identical to SEQ ID NO: 8706

SEQ ID NO: 8709 - DNA, 2762 bp, Homo sapiens
gtgccctcgcgcgacgcgaaggttgtcgggatccgcggcagcagcggctgcttgagatctgtttctggggcctctggcggtggcggcctggggcggcgcgacggctggtgcgcaggtacactgatgctgaagtactatgagccttcggaacttgtggagagactacaaagttttggttgttatggtccctttagttgggctcatacatttggggtggtacagaatcaaaagcagccctgttttccaaatacctaaaaacgacgacattcctgagcaagatagtctgggactttcaaatcttcagaagagccaaatccaggggaagtagcaggcttgcaatcttcaggtaaagaagcagctttgaatctgagcttcatatcgaaagaagagatgaaaaataccagttggattagaaagaactggcttcttgtagctgggatatctttcataggtgtccatcttggaacatactttttgcagaggtctgcaaagcagtctgtaaaatttcagtctcaaagcaaacaaaagagtattgaagagtgaagtaaaataaatatttggaattactaatttgtcattaaatcattctatgctgattagcttcataaacattgaactttttgattttatagccacaatgctgcatattcatactttaattcctaaagaataatttttaatgttaaaacgtgataatgcaataaatagaaaaatgtggtttacaaaataaaaacggtcttcactagttaccacctgaagtaagatgtctcgtttggaagctaagaagccatcattgtgtaagagtgaaccactgacaactgagagagtcaggaccacactttctgtcttgaaaagaattgtaacatcatgctatggcccctcaggtaggctgaagcagctgcacaatggctttggaggttacgtgtgtacaacctcacagtcctcagctctgctcagtcaccttttggtcacacatcccattttaaagatcctgacagcctccatacagaatcatgtgtcaagcttcagtgattgtggcttattcacagctattctttgctgcaacctgattgaaaatgttcagagattaggcttgacacccaccactgtcattagattaaataaacatcttttgagtctttgcatcagttatctcaagtctgagacctgtggttgtcgaatcccagtggactttagtagtactcagatcctcctttgtttggtgcgtagtatattaacaagtaaacctgcctgtatgctcaccagaaaggaaacagagcatgtcagtgctttgatcctgagagcctttttgcttacaattccagaaaatgctgaaggccacatcattttaggaaagagtttaattgtacctttaaaaggtcaaagagttatagattccactgtattacctgggatactcattgaaatgtcagaagttcaattaatgaggctattacctatcaaaaaatcaactgccctcaaggtggcactcttttgtacaactttatccggagacacttctgacactggagaaggaactgtggtggtcagttatggggtttctcttgaaaatgcagtcttggaccagctgcttaacctaggaaggcagctaatcagtgaccacgtagatcttgtcctgtgccaaaaagttatacatccatctttgaagcagtttctcaatatgcatcgtattattgccatagacagaattggagtgactctgatggaacccctgactaaaatgacaggaacacagcctattggatccctaggctcaatatgtcctaatagttatggaagtgtgaaagatgtgtgcactgcaaaatttggctccaaacatttttttcatcttattcctaatgaagcaacaatctgcagcttgcttctctgcaacagaaatgacactgcctgggatgagctgaagctcacgtgtcagacggcactgcatgtcctgcagttaacactcaaggaaccatgggctttgttgggaggtggctgtactgaaactcatttggctgcatatatcagacacaagactcacaacgacccagaaagcattctcaaagatgatgaatgtactcaaacagaacttcaattaattgctgaagcattttgcagtgccctagaatctgttgttggctctttagaacatgatggaggtgaaattctcactgacatgaagtatggacacctttggtcagttcaggcagattctccctgtgttgctaactggccagatttgctttcacagtgtggctgtggattatacaatagccaggaagaactcaactggtctttcttaagaagcacacgtcgtccatttgtgccacaaagctgccttccacatgaagctgtgggctcagccagcaacctgaccttggactgtttgactgcaaagcttagtggcctacaggtggctgtagagacagccaatttgattttggatctttcatatgttattgaagataaaaactaagagaatagcatgttcgtattacaagagaaacaaataaactagtctgttggcaattgagaaaaattgtgagtgtatttgttttctcccaaagccctgttctacatatttggacaaatgactcataaaattatagatacacttatttaggaaaaaaggtgattcgtgaatggaaatgccatgaaacaataaaaatatgaagcattatttatttaaaaatattatagttatcttagggattctatactggctgctgtacattgttctaaatttttgttatgttggcatc

SEQ ID NO: 8710 - protein, 570 aa, Homo sapiens; identical to SEQ ID NO: 1244

SEQ ID NO: 8711 - DNA, 934 bp, Homo sapiens
gaatattcatcttatttatcctgtatttcatattttaaattatatgcttgtggggcttttatgttggctaggaataaatatacttttaaatggttgtttgctccacttttgcttatacaacttgtattttctaatctttaaaaaataggaacacagcctattggatccctaggctcaatatgtcctaatagttatggaagtgtgaaagatgtgtgcactgcaaaatttggctccaaacatttttttcatcttattcctaatgaagcaacaatctgcagcttgcttctctgcaacagaaatgacactgcctgggatgagctgaagctcacgtgtcagacggcactgcatgtcctgcagttaacactcaaggaaccatgggctttgttgggaggtggctgtactgaaactcatttggctgcatatatcagacacaagactcacaacgacccagaaagcattctcaaagatgatgaatgtactcaaacagaacttcaattaattgctgaagcattttgcagtgccctagaatctgttgttggctctttagaacatgatggaggtgaaattctcactgacatgaagtatggacacctttggtcagttcaggcagattctccctgtgttgctaactggccagatttgctttcacagtgtggctgtggattatacaatagccaggaagaactcaactggtctttcttaagaagcacacgtcgtccatttgtgccacaaagctgccttccacatgaagctgtgggctcagccagcaacctgaccttggactgtttgactgcaaagcttagtggcctacaggtggctgtagagacagccaatttgattttggatctttcatatgttattgaagataaaaactaagagaatagcatgttcgtattacaagagaaacaaataaactagtctgttggcaattgag

SEQ ID NO: 8712 - protein, 99 aa, Homo sapiens; identical to SEQ ID NO: 8706

SEQ ID NO: 8713 - DNA, 2658 bp, Homo sapiens
gggaaaacactttaggttgagtgctgagagaaaggctctctgagtaggtgacatctgaactaagagctgaagcagaagaataagccatcctctgtggaccaaaggggacaagattctctacttttctgctacgcactaggaatatagcagagaagacaagtggctgctaccttctgttatcgtgggtggcagtgactagtttttctagatcttgactccctgccgtaactaaagatggagtacactgatgctgaagtactatgagccttcggaacttgtggagagactacaaagttttggttgttatggtccctttagttgggctcatacatttggggtggtacagaatcaaaagcagccctgttttccaaatacctaaaaacgacgacattcctgagcaagatagtctgggactttcaaatcttcagaagagccaaatccaggggaagtagcaggcttgcaatcttcaggtaaagaagcagctttgaatctgagcttcatatcgaaagaagagatgaaaaataccagttggattagaaagaactggcttcttgtagctgggatatctttcataggtgtccatcttggaacatactttttgcagaggtctgcaaagcagtctgtaaaatttcagtctcaaagcaaacaaaagagtattgaagagtgaagtaaaataaatatttggaattactaatttgtcattaaatcattctatgctgattagcttcataaacattgaactttttgattttatagccacaatgctgcatattcatactttaattcctaaagaataatttttaatgttaaaacgtgataatgcaataaatagaaaaatgtggtttacaaaataaaaacggtcttcactagttaccacctgaagtaagatgtctcgtttggaagctaagaagccatcattgtgtaagagtgaaccactgacaactgagagagtcaggaccacactttctgtcttgaaaagaattgtaacatcatgctatggcccctcaggtaggctgaagcagctgcacaatggctttggaggttacgtgtgtacaacctcacagtcctcagctctgctcagtcaccttttggtcacacatcccattttaaagatcctgacagcctccatacagaatcatgtgtcaagcttcagtgattgtggcttattcacagctattctttgctgcaacctgattgaaaatgttcagagattaggcttgacacccaccactgtcattagattaaataaacatcttttgagtctttgcatcagttatctcaagtctgagacctgtggttgtcgaatcccagtggactttagtagtactcagatcctcctttgtttggtgcgtagtatattaacaagtaaacctgcctgtatgctcaccagaaaggaaacagagcatgtcagtgctttgatcctgagagcctttttgcttacaattccagaaaatgctgaaggccacatcattttaggaaagagtttaattgtacctttaaaaggtcaaagagttatagattccactgtattacctgggatactcattgaaatgtcagaagttcaattaatgaggctattacctatcaaaaaatcaactgccctcaaggtggcactcttttgtacaactttatccggagacacttctgacactggagaaggaactgtggtggtcagttatggggtttctcttgaaaatgcagtcttggaccagctgcttaacctaggaaggcagctaatcagtgaccacgtagatcttgtcctgtgccaaaaagttatacatccatctttgaagcagtttctcaatatgcatcgtattattgccatagacagaattggagtgactctgatggaacccctgactaaaatgacaggaacacagcctattggatccctaggctcaatatgtcctaatagttatggaagtgtgaaagatgtgtgcactgcaaaatttggctccaaacatttttttcatcttattcctaatgaagcaacaatctgcagcttgcttctctgcaacagaaatgacactgcctgggatgagctgaagctcacgtgtcagacggcactgcatgtcctgcagttaacactcaaggaaccatgggctttgttgggaggtggctgtactgaaactcatttggctgcatatatcagacacaagactcacaacgacccagaaagcattctcaaagatgatgaatgtactcaaacagaacttcaattaattgctgaagcattttgcagtgccctagaatctgttgttggctctttagaacatgatggaggtgaaattctcactgacatgaagtatggacacctttggtcagttcaggcagattctccctgtgttgctaactggccagatttgctttcacagtgtggctgtggattatacaatagccaggaagaactcaactggtctttcttaagaagcacacgtcgtccatttgtgccacaaagctgccttccacatgaagctgtgggctcagccagcaacctgaccttggactgtttgactgcaaagcttagtggcctacaggtggctgtagagacagccaatttgattttggatctttcatatgttattgaagataaaaactaagagaatagcatgttcgtattacaagagaaacaaataaactagtctgttggcaattgag

SEQ ID NO: 8714 - protein, 570 aa, Homo sapiens; identical to SEQ ID NO: 1244

SEQ ID NO: 8715 - DNA, 1132 bp, Homo sapiens
gtgccctcgcgcgacgcgaaggttgtcgggatccgcggcagcagcggctgcttgagatctgtttctggggcctctggcggtggcggcctggggcggcgcgacggctggtgcgcaggtacactgatgctgaagtactatgagccttcggaacttgtggagagactacaaagttttggttgttatggtccctttagttgggctcatacatttggggtggtacagaatcaaaagcagccctgttttccaaatacctaaaaacgacgacattcctgagcaagatagtctgggactttcaaatcttcagaagagccaaatccaggggaagtagcaggcttgcaatcttcaggaacacagcctattggatccctaggctcaatatgtcctaatagttatggaagtgtgaaagatgtgtgcactgcaaaatttggctccaaacatttttttcatcttattcctaatgaagcaacaatctgcagcttgcttctctgcaacagaaatgacactgcctgggatgagctgaagctcacgtgtcagacggcactgcatgtcctgcagttaacactcaaggaaccatgggctttgttgggaggtggctgtactgaaactcatttggctgcatatatcagacacaagactcacaacgacccagaaagcattctcaaagatgatgaatgtactcaaacagaacttcaattaattgctgaagcattttgcagtgccctagaatctgttgttggctctttagaacatgatggaggtgaaattctcactgacatgaagtatggacacctttggtcagttcaggcagattctccctgtgttgctaactggccagatttgctttcacagtgtggctgtggattatacaatagccaggaagaactcaactggtctttcttaagaagcacacgtcgtccatttgtgccacaaagctgccttccacatgaagctgtgggctcagccagcaacctgaccttggactgtttgactgcaaagcttagtggcctacaggtggctgtagagacagccaatttgattttggatctttcatatgttattgaagataaaaactaagagaatagcatgttcgtattacaagagaaacaaataaactagtctgttggcaattgag

SEQ ID NO: 8716 - protein, 99 aa, Homo sapiens; identical to SEQ ID NO: 8706

SEQ ID NO: 8717 - DNA, 2534 bp, Homo sapiens
gtgccctcgcgcgacgcgaaggttgtcgggatccgcggcagcagcggctgcttgagatctgtttctggggcctctggcggtggcggcctggggcggcgcgacggctggtgcgcaggtacactgatgctgaagtactatgagccttcggaacttgtggagagactacaaagttttggttgttatggtccctttagttgggctcatacatttggggtggtacagaatcaaaagcagccctgttttccaaatacctaaaaacgacgacattcctgagcaagatagtctgggactttcaaatcttcagaagagccaaatccaggggaagtagcaggcttgcaatcttcaggtaaagaagcagctttgaatctgagcttcatatcgaaagaagagatgaaaaataccagttggattagaaagaactggcttcttgtagctgggatatctttcataggtgtccatcttggaacatactttttgcagaggtctgcaaagcagtctgtaaaatttcagtctcaaagcaaacaaaagagtattgaagagtgaagtaaaataaatatttggaattactaatttgtcattaaatcattctatgctgattagcttcataaacattgaactttttgattttatagccacaatgctgcatattcatactttaattcctaaagaataatttttaatgttaaaacgtgataatgcaataaatagaaaaatgtggtttacaaaataaaaacggtcttcactagttaccacctgaagtaagatgtctcgtttggaagctaagaagccatcattgtgtaagagtgaaccactgacaactgagagagtcaggaccacactttctgtcttgaaaagaattgtaacatcatgctatggcccctcaggtaggctgaagcagctgcacaatggctttggaggttacgtgtgtacaacctcacagtcctcagctctgctcagtcaccttttggtcacacatcccattttaaagatcctgacagcctccatacagaatcatgtgtcaagcttcagtgattgtggcttattcacagctattctttgctgcaacctgattgaaaatgttcagagattaggcttgacacccaccactgtcattagattaaataaacatcttttgagtctttgcatcagttatctcaagtctgagacctgtggttgtcgaatcccagtggactttagtagtactcagatcctcctttgtttggtgcgtagtatattaacaagtaaacctgcctgtatgctcaccagaaaggaaacagagcatgtcagtgctttgatcctgagagcctttttgcttacaattccagaaaatgctgaaggccacatcattttaggaaagagtttaattgtacctttaaaaggtcaaagagttatagattccactgtattacctgggatactcattgaaatgtcagaagttcaattaatgaggctattacctatcaaaaaatcaactgccctcaaggtggcactcttttgtacaactttatccggagacacttctgacactggagaaggaactgtggtggtcagttatggggtttctcttgaaaatgcagtcttggaccagctgcttaacctaggaaggcagctaatcagtgaccacgtagatcttgtcctgtgccaaaaagttatacatccatctttgaagcagtttctcaatatgcatcgtattattgccatagacagaattggagtgactctgatggaacccctgactaaaatgacaggaacacagcctattggatccctaggctcaatatgtcctaatagttatggaagtgtgaaagatgtgtgcactgcaaaatttggctccaaacatttttttcatcttattcctaatgaagcaacaatctgcagcttgcttctctgcaacagaaatgacactgcctgggatgagctgaagctcacgtgtcagacggcactgcatgtcctgcagttaacactcaaggaaccatgggctttgttgggaggtggctgtactgaaactcatttggctgcatatatcagacacaagactcacaacgacccagaaagcattctcaaagatgatgaatgtactcaaacagaacttcaattaattgctgaagcattttgcagtgccctagaatctgttgttggctctttagaacatgatggaggtgaaattctcactgacatgaagtatggacacctttggtcagttcaggcagattctccctgtgttgctaactggccagatttgctttcacagtgtggctgtggattatacaatagccaggaagaactcaactggtctttcttaagaagcacacgtcgtccatttgtgccacaaagctgccttccacatgaagctgtgggctcagccagcaacctgaccttggactgtttgactgcaaagcttagtggcctacaggtggctgtagagacagccaatttgattttggatctttcatatgttattgaagataaaaactaagagaatagcatgttcgtattacaagagaaacaaataaactagtctgttggcaattgag

SEQ ID NO: 8718 - protein, 570 aa, Homo sapiens; identical to SEQ ID NO: 1244

SEQ ID NO: 8719 - DNA, 880 bp, Homo sapiens
gggaaaacactttaggttgagtgctgagagaaaggctctctgagtaggtgacatctgaactaagagctgaagcagaagaataagccatcctctgtggaccaaaggggacaagattctctacttttctgctacgcactaggaatatagcagagaagacaagtggctgctaccttctgttatcgtgggtggcagtgactagtttttctagatcttgactccctgccgtaactaaagatggagtacactgatgctgaagtactatgagccttcggaacttgtggagagactacaaagttttggttgttatggtccctttagttgggctcatacatttggggtggtacagaatcaaaagcagccctgttttccaaatacctaaaaacgacgacattcctgagcaagatagtctgggactttcaaatcttcagaagagccaaatccaggggaagtagcaggcttgcaatcttcaggtaaagaagcagctttgaatctgagcttcatatcgaaagaagagatgaaaaataccagttggattagaaagaactggcttcttgtagctgggatatctttcataggtgtccatcttggaacatactttttgcagaggtctgcaaagcagtctgtaaaatttcagtctcaaagcaaacaaaagagtattgaagagtgaagtaaaataaatatttggaattactaatttgtcattaaatcattctatgctgattagcttcataaacattgaactttttgattttatagccacaatgctgcatattcatactttaattcctaaagaataatttttaatgttaaaacgtgataatgcaataaatagaaaaatgtggtttacaaaataaaaacggtcttcactagttaccacctg

SEQ ID NO: 8720 - protein, 63 aa, Homo sapiens
MSLRNLWRDYKVLVVMVPLVGLIHLGWYRIKSSPVFQIPKNDDIPEQDSLGLSNLQKSQIQGK

SEQ ID NO: 8721 - DNA, 756 bp, Homo sapiens
gtgccctcgcgcgacgcgaaggttgtcgggatccgcggcagcagcggctgcttgagatctgtttctggggcctctggcggtggcggcctggggcggcgcgacggctggtgcgcaggtacactgatgctgaagtactatgagccttcggaacttgtggagagactacaaagttttggttgttatggtccctttagttgggctcatacatttggggtggtacagaatcaaaagcagccctgttttccaaatacctaaaaacgacgacattcctgagcaagatagtctgggactttcaaatcttcagaagagccaaatccaggggaagtagcaggcttgcaatcttcaggtaaagaagcagctttgaatctgagcttcatatcgaaagaagagatgaaaaataccagttggattagaaagaactggcttcttgtagctgggatatctttcataggtgtccatcttggaacatactttttgcagaggtctgcaaagcagtctgtaaaatttcagtctcaaagcaaacaaaagagtattgaagagtgaagtaaaataaatatttggaattactaatttgtcattaaatcattctatgctgattagcttcataaacattgaactttttgattttatagccacaatgctgcatattcatactttaattcctaaagaataatttttaatgttaaaacgtgataatgcaataaatagaaaaatgtggtttacaaaataaaaacggtcttcactagttaccacctg

SEQ ID NO: 8722 - protein, 63 aa, Homo sapiens; identical to SEQ ID NO: 8720

SEQ ID NO: 8723 - DNA, 692 bp, Homo sapiens
gggaaaacactttaggttgagtgctgagagaaaggctctctgagtaggtgacatctgaactaagagctgaagcagaagaataagccatcctctgtggaccaaaggggacaagattctctacttttctgctacgcactaggaatatagcagagaagacaagtggctgctaccttctgttatcgtgggtggcagtgactagtttttctagatcttgactccctgccgtaactaaagatggagtacactgatgctgaagtactatgagccttcggaacttgtggagagactacaaagttttggttgttatggtccctttagttgggctcatacatttggggtggtacagaatcaaaagcagccctgttttccaaatacctaaaaacgacgacattcctgagcaagatagtctgggactttcaaatcttcagaagagccaaatccaggggaagtagcaggcttgcaatcttcaggtaaagaagcagctttgaatctgagcttcatatcgaaagaagagatgaaaaataccagttggattagaaagaactggcttcttgtagctgggatatctttcataggtgtccatcttggaacatactttttgcagaggtctgcaaagcagtctgtaaaatttcagtctcaaagcaaacaaaagagtattgaagagtgaagtaaaataaatatttggaattact

SEQ ID NO: 8724 - protein, 63 aa, Homo sapiens; identical to SEQ ID NO: 8720

SEQ ID NO: 8725 - DNA, 568 bp, Homo sapiens
gtgccctcgcgcgacgcgaaggttgtcgggatccgcggcagcagcggctgcttgagatctgtttctggggcctctggcggtggcggcctggggcggcgcgacggctggtgcgcaggtacactgatgctgaagtactatgagccttcggaacttgtggagagactacaaagttttggttgttatggtccctttagttgggctcatacatttggggtggtacagaatcaaaagcagccctgttttccaaatacctaaaaacgacgacattcctgagcaagatagtctgggactttcaaatcttcagaagagccaaatccaggggaagtagcaggcttgcaatcttcaggtaaagaagcagctttgaatctgagcttcatatcgaaagaagagatgaaaaataccagttggattagaaagaactggcttcttgtagctgggatatctttcataggtgtccatcttggaacatactttttgcagaggtctgcaaagcagtctgtaaaatttcagtctcaaagcaaacaaaagagtattgaagagtgaagtaaaataaatatttggaattact

SEQ ID NO: 8726 - protein, 63 aa, Homo sapiens; identical to SEQ ID NO: 8720

SEQ ID NO: 8727 - DNA, 419 bp, Homo sapiens
gtaagcgcgaaagtgcttcccttaagcttctgaaggttggctgcagttccggctacctgtgtagtccgagtttccacagccaggtactactccgccagtgaccctggacagtaacaaaacatataaagcccgagcccaaaccccgccaccatcataggtctgtagttactgtggaatcaataagccatggcatctaagaaatttgctgttaaagaagtctgtttactgttaaaagaaaccattgattcaagagttcaggagtacttggaagttcgcaaacagcacaggccatcaaatgcagaattcacaagatccaatcccttgtccttaaaaggttgagactattgtgaagagtgctattgtgaacactgtatgttcatgcctaagttcagctttagatactcaagcatttttttcaa

SEQ ID NO: 8728 - protein, 50 aa, Homo sapiens
MASKKFAVKEVCLLLKETIDSRVQEYLEVRKQHRPSNAEFTRSNPLSLKG

SEQ ID NO: 8729 - DNA, 1413 bp, Homo sapiens
gtaagcgcgaaagtgcttcccttaagcttctgaaggttggctgcagttccggctacctgtgtagtccgagtttccacagccaggtactactccgccagtgaccctggacagtaacaaaacatataaagcccgagcccaaaccccgccaccatcataggtctgtagttactgtggaatcaataagccatggcatctaagaaatttgctgttaaatgtgggaattttgctgtcctcgtggatcttcatatcttgccacaaggttcaaacaaagatacaagctggttttctgaacagaagaaagaggaagtctgtttactgttaaaagaaaccattgattcaagagttcaggagtacttggaagttcgcaaacagcacaggccatcaaatgcagaattcacaagatccaatcccttgtccttaaaaggttatggctttcaaatcacagcctatttcctcaagagagggatacgccttcgctgcatcaggagcacacagaatgctgaactctgtgtattccctgacagatttgtggtttgtgtcagtcagcttgcattcagtcgtgatcttttagcaagtcagaatgaagatttgacagaaagagttctccatggagtgtctgattactttgctgagtgtgcagagagttcacttcctcccagtgcaaagctccggagaaatgctctgaaagaaattgtgaaaagaactgaaacaaaaagcagtgtcacgagcaaatcgcagaccagaagagacactgtggaaacatctagtgactcagtgattgcagagatagcaaggaggaggaatgatggtcaggcttcctccagtcccccatcagaatccatgggacaagcaaaggattccataaaggcagctgagagccactgggggcttcctgttcaaaagctggaaaaagttaatcagacccagccagaagacactagtggccagcaaaaacctcatcctggggagcggttaaagacagggcttctaagcaggagccccgtctgtagctgtgagtcagcatcaccatgtccaaaacaaagtccacgagtggccaaaacccaacagaaacgcaggaactgcagctctgcggaagacttcgaccaccacgggagagtttctcttggaagtgatcgattagtcccgagagaaataatagtggaaaaaagcaaagctgtcagggttttgccagcttcagagttgtcagatccagggttacttttgaaacaagatttggcaaaaaccacgtctaaggaagagttgcatgttttggaaagtctctcctccagacatcttatgaaaaataacccagggcaggcacagcaaaccggcttagccacaaacactgaaagattatctacaattcagaacagcccaaccaagaaaagaaagaaatacgaaagaggccattaa

SEQ ID NO: 8730 - protein, 408 aa, Homo sapiens; identical to SEQ ID NO: 1248

SEQ ID NO: 8731 - DNA, 1374 bp, Homo sapiens
gcgaaagtgcttcccttaagcttctgaaggttggctgcagttccggctacctgtgtagtccgagtttccacagccaggtactactccgccagtgaccctggacagtaacaaaacatataaagcccgagcccaaaccccgccaccatcataggtctgtagttactgtggaatcaataagccatggcatctaagaaatttgctgttaaatgtgggaattttgctgtcctcgtggatcttcatatcttgccacaaggttcaaacaaagatacaagctggttttctgaacagaagaaagaggaagtctgtttactgttaaaagaaaccattgattcaagagttcaggagtacttggaagttcgcaaacagcacaggccatcaaatgcagaattcacaagatccaatcccttgtccttaaaaggttatggctttcaaatcacagcctatttcctcaagagagggatacgccttcgctgcatcaggagcacacagaatgctgaactctgtgtattccctgacagatttgtggtttgtgtcagtcagcttgcattcagtcgtgatcttttagcaagtcagaatgaagatttgacagaaagagttctccatggagtgtctgattactttgctgagtgtgcagagagttcacttcctcccagtgcaaagctccggagaaatgctctgaaagaaattgtgaaaagaactgaaacaaaaagcagtgtcacgagcaaatcgcagaccagaagagacactgtggaaacatctagtgactcagtgattgcagagatagcaaggaggaggaatgatggtcaggcttcctccagtcccccatcagaatccatgggacaagcaaaggattccataaaggcagctgagagccactgggggcttcctgttcaaaagctggaaaaagttaatcagacccagccagaagacactagtggccagcaaaaacctcatcctggggagcggttaaagacagggcttctaagcaggagccccgtctgtagctgtgagtcagcatcaccatgtccaaaacaaagtccacgagtggccaaaacccaacagaaacgcaggaactgcagctctgcggaagacttcgaccaccacgggagagtttctcttggaagtgatcgattagtcccgagagaaataatagtggaaaaaagcaaagctgtcagggttttgccagcttcagagttgtcagatccagggttacttttgaaacaagatttggcaaaaaccacgtctaaggaagagttgcatgttttggaaagtctctcctccagacatcttatgaaaaataacccagggcaggcacagcaaaccggcttagccacaaacactgaaagattatctacaattcagaacagcccaacc

SEQ ID NO: 8732 - protein, 397 aa, Homo sapiens
MASKKFAVKCGNFAVLVDLHILPQGSNKDTSWFSEQKKEEVCLLLKETIDSRVQEYLEVRKQHRPSNAEFTRSNPLSLKGYGFQITAYFLKRGIRLRCIRSTQNAELCVFPDRFVVCVSQLAFSRDLLASQNEDLTERVLHGVSDYFAECAESSLPPSAKLRRNALKEIVKRTETKSSVTSKSQTRRDTVETSSDSVIAEIARRRNDGQASSSPPSESMGQAKDSIKAAESHWGLPVQKLEKVNQTQPEDTSGQQKPHPGERLKTGLLSRSPVCSCESASPCPKQSPRVAKTQQKRRNCSSAEDFDHHGRVSLGSDRLVPREIIVEKSKAVRVLPASELSDPGLLLKQDLAKTTSKEELHVLESLSSRHLMKNNPGQAQQTGLATNTERLSTIQNSP

SEQ ID NO: 8733 - DNA, 811 bp, Homo sapiens
ttcccgtctccctccacaccttgcctcctccaggcccaaccccattccaccagcaccccgccccaggcgcactggctaggactggaaggcaaggactaaggtgaaagctgactgcccgcaccgccccaggcgcactgggtaggactgaaaggcagggactaaggtgacagctgactctgccggggcggagtgcgtgtcctcccaccgtgctggcgctgaactgactgtccgctgccaagggaagtgacagccgcagccgggctctcagccagcggccaggcgccccgcggaccatgctctccagtacgcagaacgcgggcggctcctatcagcgggtccgcggggcgcttgatacacagaaatgcagtccagagaaaagtgcctcatttttcagtaaagtgacatattcctggtttagcagagtaattactttaggctataagagacctttggaaagagaggatctttttgaactaaaggaaagtgattccttctgcactgcgtgtcccatctttgaaaaacaatggagaaaggaagttttaaggaatcaagagaggcaaaaagtaaaggtatcttgttataaagaggcacatatcaagaaaccatctctactctatgcattgtggaacacctttaaatccatcctgattcaagttgccttattcaaagtgtttgctgatattttgtccttcactagcccactcataatgaattataccagaaaagttaattatttgatgggcctgccatgtgaaaaccagaaaataacctcgtactcacaagccagtggaagggattcctgattttacta

SEQ ID NO: 8734 - protein, 169 aa, Homo sapiens
MLSSTQNAGGSYQRVRGALDTQKCSPEKSASFFSKVTYSWFSRVITLGYKRPLEREDLFELKESDSFCTACPIFEKQWRKEVLRNQERQKVKVSCYKEAHIKKPSLLYALWNTFKSILIQVALFKVFADILSFTSPLIMNYTRKVNYLMGLPCENQKITSYSQASGRDS

SEQ ID NO: 8735 - DNA, 4166 bp, Homo sapiens
ttcccgtctccctccacaccttgcctcctccaggcccaaccccattccaccagcaccccgccccaggcgcactggctaggactggaaggcaaggactaaggtgaaagctgactgcccgcaccgccccaggcgcactgggtaggactgaaaggcagggactaaggtgacagctgactctgccggggcggagtgcgtgtcctcccaccgtgctggcgctgaactgactgtccgctgccaagggaagtgacagccgcagccgggctctcagccagcggccaggcgccccgcggaccatgctctccagtacgcagaacgcgggcggctcctatcagcgggtccgcggggcgcttgatacacagaaatgcagtccagagaaaagtgcctcatttttcagtaaagtgacatattcctggtttagcagagtaattactttaggctataagagacctttggaaagagaggatctttttgaactaaaggaaagtgattccttctgcactgcgtgtcccatctttgaaaaacaatggagaaaggaagttttaaggaatcaagagaggcaaaaagtaaaggtatcttgttataaagaggcacatatcaagaaaccatctctactctatgcattgtggaacacctttaaatccatcctgattcaagttgccttattcaaagtgtttgctgatattttgtccttcactagcccactcataatgaagtaagttaaagtctggtgggttttttttccctcctcacagataaatgaaaagtaagtattctaatataaaagttctaatacaaaagagtagagaaggttcttattgcaaatattattaggatgtggacatgctattagggttatctacaatataaatgggaattaggataatatagtcaatatctaataaagtcaaccctgtactaagcactgctctaaaatcttatattaattttattaagcaagggttcgccagagaaacagaaccaataggatatataagcccaaataagaggggatttattatgggaattggctctcgcaattatggaggccaagaagtcccacagtcttgcatttgcaagctagagactcaggaaagacagtggcataatgcagtctgagtccaaaggccaggtaaccttgagttctgacgtccacgggcaggagaaggtggatatttcagctccaggaaagagagctaattcactctctctttaccttcttgttctatccaggccctcaacaaattggatgaggcactatgccctgggatcatccttactcagtctactgattcaaatgctaatctcttccagaaacagcctcacagacacacccagacatctggtagatggtaaaacattatttaaatgttattaaacagaaataatgttttaccatctcttcaccagtcaagttgacacgtaaaattaaccatcacattggtaatctcatttaatctttactacactcctgcaacatagacagtattattacattcagtattacaatggcagaaacagacagaaagggtggagtaatttgtccaagtccccacagctagaaagtgccagagtcgtaattgaaatctaggaagtctcgcttgaatgtatgcgatacatattttcactacgatacttagttgtggccttttgagagttgagctttaacagccatggcaattacacacacacacaaacatacactcacacacacaattactatgtataacatatatgaacatatattattattacctaatatatgtatatttctgtgcatctctatatctagatatggacatagtaaaatgacttgaaacatttctataatatctacctgcaatggtttacaggcagacaatgaaattgatcttttgactgtgccacctttttcaaggaaaccttgacttatacctagctgtcatatgaaggaaatgcaaagaaacatatattttattaactggtgattatatttttactattgaaaaatttccaagttgttagagtttttaataaccatttaattcatgaaaatatcattaatcctgcattacttagatcccatatgatattcaggaatatattcattcaatatttattgagcacctatgcatgccaaaactgttctaggtcgactgcggggacagaacaaaaatcaaaacaaagaacctgctctgatgacacttagaggggagagatgaaagccaaacaaatgaataaacataaatgataccatcagtgcttaggaacaaagtaaagtagggtaagggaatgccagtctgaggagttagaagttaccgttttatgtaaggtaattatgaaagacattggtgataaggtgacatttggtcacagttctgaaggaagttagggaggaagccaagaaaatatctattgtgattaaaggtagcaggaagggcaaaagtcatgaagaagctcatgcttgatatctctgagggcctgcaaggaggcaaagtgaggttggagcagagagctggaaaggtaagactgaggtcagaaaggtgcagagatgaaaagattttgaaggaccttatgaaatatgatgggaatattggcttttagtccacattagcagggaagaatttggaagattttgagcaaaaaaacaatgatctgcttagacttaagtcttataggaatgactctggctgctatgtggggaataaaatcaagacgtgcaagagtggaagaagaaacaccagttagaagtttgtttgcgataatccaagcaaaagttaatggtggcttcaactaggtagtagcaataagggtgataagaagtggtcagactctggttgtgttttaaaggtagagttaacagaatatactggtggactgaatgtaggttgagagaggaagcgagaagttaaggatgccttcaaaatttttgtttagatcatcaggtaaatgagtcagcatatccttgtagtatgtcacagtatacgcccaaattgttttcaccatattgcatgtgctatatagccttttaaatttaacactattttcagtcgcattgatgcagttttaaaaaggtgaaatcatgcttaaaatattattaccagtgaacatcaggcactctgagttttagacaatgtttatagttgagggactatcagccgagatacttgtaattagaaccatccccactgtttttctgctccccagcattggccctaatcatcctgatcatgctgtcacaaacttaagaggaaataaggaaaaggagagaaaaaagaaattggttatgaataaaagtgacaataaaacatgagatataaatcaagcttaaaaaaaaaaagcagcacctgtgggccatactaaaagatcccctacttacgttctggttgtcatgtttccctgtatttgataaaacacataattttgagaaaaataaagttttaaatgtatctatgtctcgacttttctgatgaagttataccagaaaagttaattatttgatgggcctgccatgtgaaaaccagaaaataacctcgtactcacaagccagtggaagggattcctgattttactaaaaaaaaaaaaaaaaaagagagggcggggacaaatatcaaattaagcaagtaaagaaaaagaacaggtaagagtgtgtgtgtgtgtgtgtgtgtgtaacactttgacaatactaaactctcataagcatttaacacttcagatgtttaacatttctgcccctttctcaatttttatgacgtgcaggcaaattatcattttctgtgaacacagctcagattttggctggaatggctatggctatgcagtggcacttcttgttgtagtctttttgcaaactctgattcttcagcaatatcaacgttttaacatgctcacctcagcaaaagttaagacagctgtaaatggactgatctacaaaaaggccttacttttatcaaatgtttctcgacaaaagttttccactggggaaattattaacttgatgtcagcaactcatggacttgacagcaaacctcaatctcctctggtctgccccttttcaaatcctaatggccgtatatctcctttggcaagagctgggtccagcagtgttagcaggggtggcagtccttgtgtttgttataccaataaatgctttagctgcaactaaaataaaaaagttaaaggtaagaaaa

SEQ ID NO: 8736 - protein, 149 aa, Homo sapiens
MFNISAPFSIFMTCRQIIIFCEHSSDFGWNGYGYAVALLVVVFLQTLILQQYQRFNMLTSAKVKTAVNGLIYKKALLLSNVSRQKFSTGEIINLMSATHGLDSKPQSPLVCPFSNPNGRISPLARAGSSSVSRGGSPCVCYTNKCFSCN

SEQ ID NO: 8737 - DNA, 1081 bp, Homo sapiens
ttcccgtctccctccacaccttgcctcctccaggcccaaccccattccaccagcaccccgccccaggcgcactggctaggactggaaggcaaggactaaggtgaaagctgactgcccgcaccgccccaggcgcactgggtaggactgaaaggcagggactaaggtgacagctgactctgccggggcggagtgcgtgtcctcccaccgtgctggcgctgaactgactgtccgctgccaagggaagtgacagccgcagccgggctctcagccagcggccaggcgccccgcggaccatgctctccagtacgcagaacgcgggcggctcctatcagcgggtccgcggggcgcttgatacacagagtaattactttaggctataagagacctttggaaagagaggatctttttgaactaaaggaaagtgattccttctgcactgcgtgtcccatctttgaaaaacaatggagaaaggaagttttaaggaatcaagagaggcaaaaagtaaaggtatcttgttataaagaggcacatatcaagaaaccatctctactctatgcattgtggaacacctttaaatccatcctgattcaagttgccttattcaaagtgtttgctgatattttgtccttcactagcccactcataatgaagcaaattatcattttctgtgaacacagctcagattttggctggaatggctatggctatgcagtggcacttcttgttgtagtctttttgcaaactctgattcttcagcaatatcaacgttttaacatgctcacctcagcaaaagttaagacagctgtaaatggactgatctacaaaaaggccttacttttatcaaatgtttctcgacaaaagttttccactggggaaattattaacttgatgtcagcaactcatggacttgacagcaaacctcaatctcctctggtctgccccttttcaaatcctaatggccgtatatctcctttggcaagagctgggtccagcagtgttagcaggggtggcagtccttgtgtttgttataccaataaatgctttagctgcaactaaaataaaaaagttaaaggtaagaaaa

SEQ ID NO: 8738 - protein, 136 aa, Homo sapiens
MKQIIIFCEHSSDFGWNGYGYAVALLVVVFLQTLILQQYQRFNMLTSAKVKTAVNGLIYKKALLLSNVSRQKFSTGEIINLMSATHGLDSKPQSPLVCPFSNPNGRISPLARAGSSSVSRGGSPCVCYTNKCFSCN

SEQ ID NO: 8739 - DNA, 2822 bp, Homo sapiens
ttcccgtctccctccacaccttgcctcctccaggcccaaccccattccaccagcaccccgccccaggcgcactggctaggactggaaggcaaggactaaggtgaaagctgactgcccgcaccgccccaggcgcactgggtaggactgaaaggcagggactaaggtgacagctgactctgccggggcggagtgcgtgtcctcccaccgtgctggcgctgaactgactgtccgctgccaagggaagtgacagccgcagccgggctctcagccagcggccaggcgccccgcggaccatgctctccagtacgcagaacgcgggcggctcctatcagcgggtccgcggggcgcttgatacacagaaatgcagtccagagaaaagtgcctcatttttcagtaaagtgacatattcctggtttagcagagtaattactttaggctataagagacctttggaaagagaggatctttttgaactaaaggaaagtgattccttctgcactgcgtgtcccatctttgaaaaacaatggagaaaggaagttttaaggaatcaagagaggcaaaaagtaaaggtatcttgttataaagaggcacatatcaagaaaccatctctactctatgcattgtggaacacctttaaatccatcctgattcaagttgccttattcaaagtgtttgctgatattttgtccttcactagcccactcataatgaagcaaattatcattttctgtgaacacagctcagattttggctggaatggctatggctatgcagtggcacttcttgttgtagtctttttgcaaactctgattcttcagcaatatcaacgttttaacatgctcacctcagcaaaagttaagacagctgtaaatggactgatctacaaaaaggccttacttttatcaaatgtttctcgacaaaagttttccactggggaaattattaacttgatgtcagcaactcatggacttgacagcaaacctcaatctcctctggtctgccccttttcaaatcctaatggccgtatatctcctttggcaagagctgggtccagcagtgttagcaggggtggcagtccttgtgtttgttataccaataaatgctttagctgcaactaaaataaaaaagttaaaggtaagaaaatgactgcctcatgttacatgtgtcaaacaggagctgagttttctgacttgagttaacaatcaccatctcgctaattatatagagagagttacaaatggaagtcatcgaattttatcatttacttattcactcaaccagtattgaacaagcatgtatcttatgtcagccagtgtttcaggcacaggaagtacagcagtgaggggaaatgacaagtccagctctcatgaggggtagtggaggagacaggcattaagcaagtacataaatagagagaaaacatttgtatatgaaaaagatttagtaaaatacagtgatgaagagacaaaggatgccattttacatttaggatcaggaaagtcctcagaaagggaatggtatatcaacagggtgaaggagtaattcaagtggacatctgagggaaagacacaccaagcaaagggaagagtatgcatgcagcctggaggtaggggtatgcttggttgtttgaaaagtgaagtactgcagcaagcagacaggaaatgcttcactaaattaatgttgatattcttcctttatattcagtcattcatcttaccatcaatatatgttttgacatcccgccatgtgttagacagtgtgcactatgctatactctaagaaatggagaaaccacagagttcactgcattgaaggaaatcacactgcaatgagatagatgctttcatatgttaaattaacagaggtggatgtattgcttatgaaaacattttataattttaaatggatcaaagattaacaatatatattgacatggaaacatgtcaatcatattttaaagcaaaaaggagattaaatatatgcatgtatatcatacatatgtgtagctatatcattgatccattattaaaatgtgaatatacctatacacatgtgtgtaatggagaggtaaatagatgaagatacatagctataaatatatttgcataagcatagaagtaatctagagataaagcatcagtctttaaagaatagttacctgtaaagtagaattagacagaaggaggatagatttttacttctgactttaataccccaagtgactaaaaattgtatagtattttatatttttcttaatttttcaaataaaagatgactggtttttaaacataaaaactagaaaatagcatatatttatgaagtaaaggtacttagcatgctagtgtttagaataacagatttgtttataacaaatatttttaactagttttaaaaaatatattctggattttaaaaactgctatttaaaggcacattattaagaatggaaaaatattttttgaaccttaatctagagtcctataaccttcaaagatatttcaatattatatccaaatatactaaataaaaaatatgactttaggcccggcgcagtggctcatgcctgtaatcccagcactttgggaggccgaggcgggcagatgacctaaggtcgggagttcgagactaaactgaccaacatggagaaaccccgtctctactaaaatataagattagccgggcatggtggcacgtgcctgtaatctcagctactcaggaggatgaggcaggagaatcacttgaacctgtaaggcggaggttgcagtgagccgagttcatgcaattgcactccagcctgggcaacaagaacaaaactccgtctc

SEQ ID NO: 8740 - protein, 274 aa, Homo sapiens
MLSSTQNAGGSYQRVRGALDTQKCSPEKSASFFSKVTYSWFSRVITLGYKRPLEREDLFELKESDSFCTACPIFEKQWRKEVLRNQERQKVKVSCYKEAHIKKPSLLYALWNTFKSILIQVALFKVFADILSFTSPLIMKQIIIFCEHSSDFGWNGYGYAVALLVVVFLQTLILQQYQRFNMLTSAKVKTAVNGLIYKKALLLSNVSRQKFSTGEIINLMSATHGLDSKPQSPLVCPFSNPNGRISPLARAGSSSVSRGGSPCVCYTNKCFSCN

SEQ ID NO: 8741 - DNA, 3361 bp, Homo sapiens
ttcccgtctccctccacaccttgcctcctccaggcccaaccccattccaccagcaccccgccccaggcgcactggctaggactggaaggcaaggactaaggtgaaagctgactgcccgcaccgccccaggcgcactgggtaggactgaaaggcagggactaaggtgacagctgactctgccggggcggagtgcgtgtcctcccaccgtgctggcgctgaactgactgtccgctgccaagggaagtgacagccgcagccgggctctcagccagcggccaggcgccccgcggaccatgctctccagtacgcagaacgcgggcggctcctatcagcgggtccgcggggcgcttgatacacagaaatgcagtccagagaaaagtgcctcatttttcagtaaagtgacatattcctggtttagcagagtaattactttaggctataagagacctttggaaagagaggatctttttgaactaaaggaaagtgattccttctgcactgcgtgtcccatctttgaaaaacaatggagaaaggaagttttaaggaatcaagagaggcaaaaagtaaaggtatcttgttataaagaggcacatatcaagaaaccatctctactctatgcattgtggaacacctttaaatccatcctgattcaagttgccttattcaaagtgtttgctgatattttgtccttcactagcccactcataatgaagcaaattatcattttctgtgaacacagctcagattttggctggaatggctatggctatgcagtggcacttcttgttgtagtctttttgcaaactctgattcttcagcaatatcaacgttttaacatgctcacctcagcaaaagttaagacagctgtaaatggactgatctacaaaaaggtgtccctggcaaccttgtgtgtctatttcttactggatgaaggaaacattttaacagccactaaagtgttcacatcgatgtctttgtttaatattttaaggattcctctgtttgagttaccaaccgtgatctcagctgtggtccagacaaagatatccctgggccgtttggaagactttctcaacactgaggagcttcttcctcaaagtattgaaacgaactatacaggagatcatgctattgggtttacagatgcttctttctcctgggataaaacaggaatgccagttctaaaagaggctctgtggcttatgtttctcagcaggcctggattcagaattgcattttgcaagaaaacattctctttggctccatcatgaagaaagagttttatgagcaagtattggaagcctgtgctctccttccagatttggagcagttgccaaagggagatcaaactgagattggagaaagagtaaggaaactgctgtgaatataagtgggggccagcagcatcgagtaagcctggccagagctgtctacagtggggccgacgtctacctcctggatgatcccttgtctgctattgatgttcatgttggaaagcagctttttgaaaaagtgatagggtccttgggccttttgaaaaaccgggtagccatagtttcatttatgctttcttgtggggcaggggatatatctagcactgtgcctaaaattccatttattttgtttatttgttgaagcaaagtagtcacatttcacatgaaaaaaatgggatgctcagattgcaatttcacaggcaaatgtcaatgggtaatttttgaagttttacttacaagtttactctggtgacaatttatgtgattgttatctcttcatctaataccatatcctaaggggatgtatgtgccataatgaattgttgttgactcaagtgatttttacaatggtattttggtgcacaccaaaatattaataaaattttatattattaacatagcaatttgacattattatcacagcaatcatagtgattcagctgttttgttaaagggccaagaagatgaaaattagtgtttaccagtacatgccatatttcacagggtaaattagttcaatccctatttcacacataaaggagctcagggctcacaatgacttgatataggttgctcaacttaagaacaatagagatttttaaaagtatgtctgactccaaagccacattcttcataatatgtgtttatggaattattaatatagagaactttgaaaatatatgtataaaattataaaatatatgtctcagtaaaaataaacaaacatctttatatattgacataaacccaagattaaaaatgtcacacttaattgtatgtatatgtataaaataatatgaatgatttaaaaataaggactatgaattatgacttggattaaacacttttttgtaatggtactgtatatttaaaaataagcaagaatgacatatatgaaattgttttaaatttgcaattaaattgattcatttctaatgaacgaaaaaatacccgaactaaagtgttaaaaatcacatttagaaactattttctcatctagcagcatgtcattattccttgtaaaatacatagatgctgccttaaactggcacctaccaaaaatcatactctgaaatagtaaaggaaaaaagtcattgtagctttttttaaaaagccatttttcgtaatctctgagataaaacactttgtttttcagactcatattttagtgacacacaatctcacacttctgccacaaatgaatcttattgttgtaatgaaaagtggcagaatagctcaaatgggaatataccaggagctgctgtgtaaaaccaaaaatctcactaatttgcaccaagtcatcagtgaacaagaaaaagctcatgctctaaagcaagtcagtgcaatcaactccagaactagaccaaaagacaaaatcctggagcaaaaacatagtgggatatgagtccccttctgagagtcatgcaaggatttctaggcactgttaagaacccacgtagaaagaagatgttaagtgacggtagaaccagttttcagggttgcctgattttttgaagcagcacttcacagaagtcgaggtgaccaggattgacatgcaagttctaagagacaggccctcattggatcaaggaaaacagctctcaatgaaaaaagaaaagatccctgttggtgggttgaagttctccatcattctgcagtacctccaagcctttggctggctctgggtgtggctgactgtggtcacttacttagggcagaatttggtgagcattggacagaatctatggcttagtgcatgggcaaaagaagcaaaaaacatgaatgagttcacagaatggaagcaaataagaagcaataaacttaacatctatggattattgggattaataaaaggtaaaagaaaatgt

SEQ ID NO: 8742 - protein, 325 aa, Homo sapiens
MLSSTQNAGGSYQRVRGALDTQKCSPEKSASFFSKVTYSWFSRVITLGYKRPLEREDLFELKESDSFCTACPIFEKQWRKEVLRNQERQKVKVSCYKEAHIKKPSLLYALWNTFKSILIQVALFKVFADILSFTSPLIMKQIIIFCEHSSDFGWNGYGYAVALLVVVFLQTLILQQYQRFNMLTSAKVKTAVNGLIYKKVSLATLCVYFLLDEGNILTATKVFTSMSLFNILRIPLFELPTVISAVVQTKISLGRLEDFLNTEELLPQSIETNYTGDHAIGFTDASFSWDKTGMPVLKEALWLMFLSRPGFRIAFCKKTFSLAPS

SEQ ID NO: 8743 - DNA, 1044 bp, Homo sapiens
ggactaaggtgaaagctgactgcccgcaccgccccaggcgcactgggtaggactgaaaggcagggactaaggtgacagctgactctgccggggcggagtgcgtgtcctcccaccgtgctggcgctgaactgactgtccgctgccaagggaagtgacagccgcagccgggctctcagccagcggccaggcgccccgcggaccatgctctccagtacgcagaacgcgggcggctcctatcagcgggtccgcggggcgcttgatacacagaaatgcagtccagagaaaagtgcctcatttttcagtaaagtgacatattcctggtttagcagagtaattactttaggctataagagacctttggaaagagaggatctttttgaactaaaggaaagtgattccttctgcactgcgtgtcccatctttgaaaaacaatggagaaaggaagttttaaggaatcaagagaggcaaaaagtaaaggtatcttgttataaagaggcacatatcaagaaaccatctctactctatgcattgtggaacacctttaaatccatcctgattcaagttgccttattcaaagtgtttgctgatattttgtccttcactagcccactcataatgaagcaaattatcattttctgtgaacacagctcagattttggctggaatggctatggctatgcagtggcacttcttgttgtagtctttttgcaaactctgattcttcagcaatatcaacgttttaacatgctcacctcagcaaaagttaagacagctgtaaatggactgatctacaaaaaggccttacttttatcaaatgtttctcgacaaaagttttccactggggaaattattaacttgatgtcagcaactcatggacttgacagcaaacctcaatctcctctggtctgccccttttcaaatcctaatggccgtatatctcctttggcaagagctgggtccagcagtgttagcaggggtggcagtccttgtgtttgttataccaataaatgctttagctgcaactaaaataaaaaagttaaaggt

SEQ ID NO: 8744 - protein, 274 aa, Homo sapiens; identical to SEQ ID NO: 8740

SEQ ID NO: 8745 - DNA, 913 bp, Homo sapiens
ctgaaaggcagggactaaggtgacagctgactctgccggggcggagtgcgtgtcctcccaccgtgctggcgctgaactgactgtccgctgccaagggaagtgacagccgcagccgggctctcagccagcggccaggcgccccgcggaccatgctctccagtacgcagaacgcgggcgtttttcatctttagagtaattactttaggctataagagacctttggaaagagaggatctttttgaactaaaggaaagtgattccttctgcactgcgtgtcccatctttgaaaaacaatggagaaaggaagttttaaggaatcaagagaggcaaaaagtaaaggtatcttgttataaagaggcacatatcaagaaaccatctctactctatgcattgtggaacacctttaaatccatcctgattcaagttgccttattcaaagtgtttgctgatattttgtccttcactagcccactcataatgaagcaaattatcattttctgtgaacacagctcagattttggctggaatggctatggctatgcagtggcacttcttgttgtagtctttttgcaaactctgattcttcagcaatatcaacgttttaacatgctcacctcagcaaaagttaagacagctgtaaatggactgatctacaaaaaggccttacttttatcaaatgtttctcgacaaaagttttccactggggaaattattaacttgatgtcagcaactcatggacttgacagcaaacctcaatctcctctggtctgccccttttcaaatcctaatggccgtatatctcctttggcaagagctgggtccagcagtgttagcaggggtggcagtccttgtgtttgttataccaataaatgctttagctgcaactaaaataaaaaagttaaaggtaagaaaa

SEQ ID NO: 8746 - protein, 136 aa, Homo sapiens; identical to SEQ ID NO: 8738

SEQ ID NO: 8747 - DNA, 370 bp, Homo sapiens
agagtaattactttaggctataagagacctttggaaagagaggatctttttgaactaaaggaaagtgattccttctgcactgcgtgtcccatctttgaaaaacaatggagaaaggaagttttaaggaatcaagagaggcaaaaagtaaaggtatcttgttataaagaggcacatatcaagaaaccatctctactctatgcattgtggaacacctttaaatccatcctgattcaagttgccttattcaaagtgtttgctgatattttgtccttcactagcccactcataatgaattataccagaaaagttaattatttgatgggcctgccatgtgaaaaccagaaaataacctcgtactcacaagccagtg

SEQ ID NO: 8748 - DNA, 3768 bp, Homo sapiens
atcacaagcctgttcggcgggactgtgatggccagagagatgacgatcttaggatcggctgttttgactctcctgttggccggctatttggcacaacagtatttaccattgcctactcctaaagtgattggtattgatcttggcaccacctattgttctgttggggtgttttttcctggcacaggaaaagtaaaggtgattccagatgaaaatgggcatatcagcatacccagcatggtgtcttttactgacaatgatgtatatgtgggatatgaaagcgtagagctggcagattcaaatcctcaaaacacaatatatgatgccaaaagattcataggcaagatttttaccgcagaagagttggaggctgaaattgcagaatttgatctaaaacagagaaattcaacaattgaagctgctaaccttgcaggactgaagattttgagggtaataaatgaacccacagcagcagctatggcctatggtctccacaaggctgacgtcttccacgtcttggtgatagacttgggcggaggaactctagatgtgtctttactgaataaacaaggagggatgtttctaacccgagcaatgtctggaaacaataaacttggaggacaggacttcaatcagagattgcttcagtacttatataaacagatctatcaaacatatggcttcgtgccctctaggaaagaggaaatccacagattgagacaagctgtggaaatggtcaaattaaatctgactcttcatcaatctgctcagttgtcagtattactaacggtggaggagcaggacaggaaggaacctcacagtagtgacactgaactgccaaaagacaaactttcctcagcagatgaccatcgcgtgaacagtgggtttggacgtggcctttctgataagaaaagtggagaaagtcaggttttatttgaaacagaaatatcacggaaactctttgatacccttaatgaagacctctttcagaaaatactggtacccattcagcaagtattgaaagaaggccacctggaaaagactgagattgatgaggtggttttagttgggggctccactcgtattcctcggatccgtcaagtcattcaagagttctttggaaaagatcccaacacatctgtagaccctgacctagcagtagtaacgggagtggctatccaagcagggattgatggaggctcttggcctctccaagtcagtgctttagaaattcccaataagcatttacaaaaaaccaacttcaactgaattctgcagaaataatggttatttgtgaacttgtctgatgatctcttcccatttatcagattaccttttccacaaaagaaagtctctaaaatatcacagatttacctagagggcaacatttagatacaggaaaattttacatagtgttttgtcttaggattagacgtgaccagattgatcctgtttgattttggagagatcctattctaacaaatactctaaaatgataaaattgaggtacaactctcttaaaagagtatggataactatattttctggattctggaggttgataaccatatgcacttaacattatattctataaacattaagtagtgccagttatgagattcccagttcttactaaattgtattagcaggagctggtaattacttgtattatcacatgtaactaataatttgaactatacttgaaggaccgtgttgatgtcaggtatttacagtggttggaagatagcagtattattagcataagctgcatacgtaatattcagtaactgccatattatataacaaatttacattcacaaattcagtatcctgttaagtgtcatattcttgtaatctgcattctccaggagttttatgtgtttaatagatgaatttattttatttctaaaggtattcaaatgtttcagcaccatataatagaaatacccaattatattctagttcctttatgtcctgtacatcattctctgcttggatttccattattctgtttggttagagaataaaattggtaattgcatttgaagaatgtgttaatgtcataataaagccatgattgctatcttatttttgttatccgagacctttgcaaacattggcaaatagcatcaattacctactgtatttgtttctttgtttatattttcagtaagccctggggaatatagcatggaattgagctactaaatggttttggttccgttttacggagatttttcctcatatttagttttgaatgaggaaaatgtgctcaattataaaagctgtgttattgttttctattattatttttaaataatcacacttggactcttttcaaacattaggttagtttgtaatgaaagcaaaaaatttgtgaatactggaagtaacgtggaaatctaatgtggaagccattgtggcaaggtttctacaaatcggcatttggagcagagttgtttgtttttgttgtttgtttcctttaagaaaaaccacagggaccaagaaagaaaatataacagtttgatttctgtcatacccattgtatttgaagatatatggatacagattatatatatatatacatattttccttaatagaggaatgcttcatattattcaaaaattatatcctgatcacctttttttgttttttattgtaaagtatctctgctttatccattgctgaattcgataggatgttgaaatgctggtcaccaaaaaaggaaactgagcaaattcatttcaacaacatcaaaacttcagcttctcatagtaaaaagctgaatgttactaatatttttcatatctaaaaaaaaattcttagcaatgaaattgctgttaaaacacaaatttcaatcaaatacttttgtgtatagaaaatatgtatagtaggtagatagaaaagtataaaatgtttgttgaagtatcttattttagaatgaatggagaaatgccaaagatgaatccttcactgcattatgaaaatatttcacatgttctcttggactttatataaatctgtaatagattttagaattgaaaaattctttgtgaaggtcttctaaaagtgttccaatttatctcaaaatctccatatataggatcagcttaaaacataaagaaaaccttgaatttctcaaatgtttgagatgttcaagacagtctcttaatccgttaatgcttttggaaacaattgacaaaatagggcaggcagctcatctcatgtcctgaagttggaatttaaataattcctatttgcaaattagaatgacagtgttggaatttggaggcagtagttgagcatattctctagtatatagctacacctttaataaaatgaaggaatgtcttcaatcatattttagtgggctatttataaatagtcttgaagtcaatttagtttatttatttaaaagataatgcatcctgaaagggatcatttatgaataacaatctgaagtcttttcataaaaaaaattaataaactttagttgtacatttagccagtgttatttgaagtatgtaacttttaaaatattaagtgtcttgtatgattagaatatgtgaatgagtaacttattttgtatcaggaatgttttggtactgtgttttcactcaaaccactgacttaacagatactgctgtgtataacatgtactaaatattacagttattgtgcataacagattgttcctcttatatttgtgtgtatacaggcaattcatgttttaatgtaaataaataccattttgcagtttgttttttaaa

SEQ ID NO: 8749 - protein, 412 aa, Homo sapiens
MAREMTILGSAVLTLLLAGYLAQQYLPLPTPKVIGIDLGTTYCSVGVFFPGTGKVKVIPDENGHISIPSMVSFTDNDVYVGYESVELADSNPQNTIYDAKRFIGKIFTAEELEAEIAEFDLKQRNSTIEAANLAGLKILRVINEPTAAAMAYGLHKADVFHVLVIDLGGGTLDVSLLNKQGGMFLTRAMSGNNKLGGQDFNQRLLQYLYKQIYQTYGFVPSRKEEIHRLRQAVEMVKLNLTLHQSAQLSVLLTVEEQDRKEPHSSDTELPKDKLSSADDHRVNSGFGRGLSDKKSGESQVLFETEISRKLFDTLNEDLFQKILVPIQQVLKEGHLEKTEIDEVVLVGGSTRIPRIRQVIQEFFGKDPNTSVDPDLAVVTGVAIQAGIDGGSWPLQVSALEIPNKHLQKTNFN

SEQ ID NO: 8750 - DNA, 3986 bp, Homo sapiens
gccgggaggagtgggggcggtgcctcacgtctggtacagtcatcacaagcctgttcggcgggactgtgatggccagagagatgacgatcttaggatcggctgttttgactctcctgttggccggctatttggcacaacagtatttaccattgcctactcctaaagtgattggtattgatcttggcaccacctattgttctgttggggtgttttttcctggcacaggaaaagtaaaggtgattccagatgaaaatgggcatatcagcatacccagcatggtgtcttttactgacaatgatgtatatgtgggatatgaaagcgtagagctggcagattcaaatcctcaaaacacaatatatgatgccaaaagattcataggcaagatttttaccgcagaagagttggaggctgaaattggcagatacccatttaaggttttaaacaaaaatggaatggttgagttttctgtgacaagtaatgagaccatcacagtgtccccagaatatgttggctctcgactattgttgaagttaaaggaaatggcagaggcatatcttggaatgccagttgccaatgctgtcatttctgtaccagcagaatttgatctaaaacagagaaattcaacaattgaagctgctaaccttgcaggactgaagattttgagggtaataaatgaacccacagcagcagctatggcctatggtctccacaaggctgacgtcttccacgtcttggtgatagacttgggcggaggaactctagatgtgtctttactgaataaacaaggagggatgtttctaacccgagcaatgtctggaaacaataaacttggaggacaggacttcaatcagagattgcttcagtacttatataaacagatctatcaaacatatggcttcgtgccctctaggaaagaggaaatccacagattgagacaagctgtggaaatggtcaaattaaatctgactcttcatcaatctgctcagttgtcagtattactaacggtggaggagcaggacaggaaggaacctcacagtagtgacactgaactgccaaaagacaaactttcctcagcagatgaccatcgcgtgaacagtgggtttggacgtggcctttctgataagaaaagtggagaaagtcaggttttatttgaaacagaaatatcacggaaactctttgatacccttaatgaagacctctttcagaaaatactggtacccattcagcaagtattgaaagaaggccacctggaaaagactgagattgatgaggtggttttagttgggggctccactcgtattcctcggatccgtcaagtcattcaagagttctttggaaaagatcccaacacatctgtagaccctgacctagcagtagtaacgggagtggctatccaagcagggattgatggaggctcttggcctctccaagtcagtgctttagaaattcccaataagcatttacaaaaaaccaacttcaactgaattctgcagaaataatggttatttgtgaacttgtctgatgatctcttcccatttatcagattaccttttccacaaaagaaagtctctaaaatatcacagatttacctagagggcaacatttagatacaggaaaattttacatagtgttttgtcttaggattagacgtgaccagattgatcctgtttgattttggagagatcctattctaacaaatactctaaaatgataaaattgaggtacaactctcttaaaagagtatggataactatattttctggattctggaggttgataaccatatgcacttaacattatattctataaacattaagtagtgccagttatgagattcccagttcttactaaattgtattagcaggagctggtaattacttgtattatcacatgtaactaataatttgaactatacttgaaggaccgtgttgatgtcaggtatttacagtggttggaagatagcagtattattagcataagctgcatacgtaatattcagtaactgccatattatataacaaatttacattcacaaattcagtatcctgttaagtgtcatattcttgtaatctgcattctccaggagttttatgtgtttaatagatgaatttattttatttctaaaggtattcaaatgtttcagcaccatataatagaaatacccaattatattctagttcctttatgtcctgtacatcattctctgcttggatttccattattctgtttggttagagaataaaattggtaattgcatttgaagaatgtgttaatgtcataataaagccatgattgctatcttatttttgttatccgagacctttgcaaacattggcaaatagcatcaattacctactgtatttgtttctttgtttatattttcagtaagccctggggaatatagcatggaattgagctactaaatggttttggttccgttttacggagatttttcctcatatttagttttgaatgaggaaaatgtgctcaattataaaagctgtgttattgttttctattattatttttaaataatcacacttggactcttttcaaacattaggttagtttgtaatgaaagcaaaaaatttgtgaatactggaagtaacgtggaaatctaatgtggaagccattgtggcaaggtttctacaaatcggcatttggagcagagttgtttgtttttgttgtttgtttcctttaagaaaaaccacagggaccaagaaagaaaatataacagtttgatttctgtcatacccattgtatttgaagatatatggatacagattatatatatatatacatattttccttaatagaggaatgcttcatattattcaaaaattatatcctgatcacctttttttgttttttattgtaaagtatctctgctttatccattgctgaattcgataggatgttgaaatgctggtcaccaaaaaaggaaactgagcaaattcatttcaacaacatcaaaacttcagcttctcatagtaaaaagctgaatgttactaatatttttcatatctaaaaaaaaattcttagcaatgaaattgctgttaaaacacaaatttcaatcaaatacttttgtgtatagaaaatatgtatagtaggtagatagaaaagtataaaatgtttgttgaagtatcttattttagaatgaatggagaaatgccaaagatgaatccttcactgcattatgaaaatatttcacatgttctcttggactttatataaatctgtaatagattttagaattgaaaaattctttgtgaaggtcttctaaaagtgttccaatttatctcaaaatctccatatataggatcagcttaaaacataaagaaaaccttgaatttctcaaatgtttgagatgttcaagacagtctcttaatccgttaatgcttttggaaacaattgacaaaatagggcaggcagctcatctcatgtcctgaagttggaatttaaataattcctatttgcaaattagaatgacagtgttggaatttggaggcagtagttgagcatattctctagtatatagctacacctttaataaaatgaaggaatgtcttcaatcatattttagtgggctatttataaatagtcttgaagtcaatttagtttatttatttaaaagataatgcatcctgaaagggatcatttatgaataacaatctgaagtcttttcataaaaaaaattaataaactttagttgtacatttagccagtgttatttgaagtatgtaacttttaaaatattaagtgtcttgtatgattagaatatgtgaatgagtaacttattttgtatcaggaatgttttggtactgtgttttcactcaaaccactgacttaacagatactgctgtgtataacatgtactaaatattacagttattgtgcataacagattgttcctcttatatttgtgtgtatacaggcaattcatgttttaatgtaaataaataccattttgcagtttgttttttaaa

SEQ ID NO: 8751 - protein, 471 aa, Homo sapiens; identical to SEQ ID NO: 1250

SEQ ID NO: 8752 - DNA, 2260 bp, Homo sapiens
gccgggaggagtgggggcggtgcctcacgtctggtacagtcatcacaagcctgttcggcgggactgtgatggccagagagatgacgatcttaggatcggctgttttgactctcctgttggccggctatttggcacaacagtatttaccattgcctactcctaaagtgattggtattgatcttggcaccacctattgttctgttggggtgttttttcctggcacaggaaaagtaaaggtgattccagatgaaaatgggcatatcagcatacccagcatggtgtcttttactgacaatgatgtatatgtgggatatgaaagcgtagagctggcagattcaaatcctcaaaacacaatatatgatgccaaaagattcataggcaagatttttaccgcagaagagttggaggctgaaattggcagatacccatttaaggttttaaacaaaaatggaatggttgagttttctgtgacaagtaatgagaccatcacagtgtccccagaatatgttggctctcgactattgttgaagttaaaggaaatggcagaggcatatcttggaatgccagttgccaatgctgtcatttctgtaccagcagaatttgatctaaaacagagaaattcaacaattgaagctgctaaccttgcaggactgaagattttgagggtaataaatgaacccacagcagcagctatggcctatggtctccacaaggctgacgtcttccacgtcttggtgatagacttgggcggaggaactctagatgtgtctttactgaataaacaaggagggatgtttctaacccgagcaatgtctggaaacaataaacttggaggacaggacttcaatcagagattgcttcagtacttatataaacagatctatcaaacatatggcttcgtgccctctaggaaagaggaaatccacagattgagacaagctgtggaaatggtcaaattaaatctgactcttcatcaatctgctcagttgtcagtattactaacggtggaggagcaggacaggaaggaacctcacagtagtgacactgaactgccaaaagacaaactttcctcagcagatgaccatcgcgtgaacagtgggtttggacgtggcctttctgataagaaaagtggagaaagtcaggttttatttgaaacagaaatatcacggaaactctttgatacccttaatgaagacctctttcagaaaatactggtacccattcagcaagtattgaaagaaggccacctggaaaagactgagattgatgaggtggttttagttgggggctccactcgtattcctcggatccgtcaagtcattcaagagttctttggaaaagatcccaacacatctgtagaccctgacctagcagtagtaacgggagtggctatccaagcagggattgatggaggctcttggcctctccaagtcagtgctttagaaattcccaataagcatttacaaaaaaccaacttcaactgaattctgcagaaataatggttatttgtgaacttgtctgatgatctcttcccatttatcagattaccttttccacaaaagaaagtctctaaaatatcacagatttacctagagggcaacatttagatacaggaaaattttacatagtgttttgtcttaggattagacgtgaccagattgatcctgtttgattttggagagatcctattctaacaaatactctaaaatgataaaattgaggtacaactctcttaaaagagtatggataactatattttctggattctggaggttgataaccatatgcacttaacattatattctataaacattaagtagtgccagttatgagattcccagttcttactaaattgtattagcaggagctggtaattacttgtattatcacatgtaactaataatttgaactatacttgaaggaccgtgttgatgtcaggtatttacagtggttggaagatagcagtattattagcataagctgcatacgtaatattcagtaactgccatattatataacaaatttacattcacaaattcagtatcctgttaagtgtcatattcttgtaatctgcattctccaggagttttatgtgtttaatagatgaatttattttatttctaaaggtattcaaatgtttcagcaccatataatagaaatacccaattatattctagttcctttatgtcctgtacatcattctctgcttggatttccattattctgtttggttagagaataaaattggtaattgcatttg

SEQ ID NO: 8753 - protein, 471 aa, Homo sapiens; identical to SEQ ID NO: 1250

SEQ ID NO: 8754 - DNA, 1382 bp, Homo sapiens
tagacagcacactgctgactgttttcagttgtttctgtaacagcagaaagtgcactcactaggagtagtcagaattcaaaatgctcaagagaaagccatccaatgtttcagagaaggagaaacatcaaaaaccaaagaaaggagacatcatagacattatttgcaaaacaccaatggggatgtggacaggaatgttgaacaataaagtgggaaacttcaaattcatttatgtggatgtcatctcagaagaggaagcagcccccaagaaaataaaggcaaaccgaaggagtaacagcaaaaaatccaagactctgcaggagttcctagagaggattcatctgcaggaatacacctcaacacttttgctcaatggttatgagactctagaagatttaaaagatataaaagagagtcacctcattgaattaaatattgaaaacccagatgacagaagaaggttactatcagctgctgaaaacttccttgaagaagaaattattcaagagcaagaaaatgaacctgagcccctatccttgagctcagacatctccttaaataagtcacagttagatgactgcccaagggactctggttgctatatctcatcaggaaattcagataatggcaaagaggatctggagtctgaaaatctgtctgacatggtacataagattattatcacagagccaagtgactgaacacgcattcccaactatatatctacagatgcattccattttaactcttcttgagctaaaacgtcaaataggagaggaagataagataaatatttgtaaataaaacctaaagtttaaatgttttaatctgaataattgtacataaaattttgtatctctaacattccaaattactgtcaataaaatatatatttattattttaaatgctatgtgttaatatttcacttgcttgtattagaaaggcaaaatgtaagactttggtatgtgtgacatatgctttatttggctttattttacaagtacagtatctgcaaaaaacaaagtaaccttttttcatacctgccagttttgaatttatatatgttattgaacaaatagtaatagaggattcgctgttgaaacaagttgtccaagcaatgttatattcatttttatacttattgggaaagtgtgagttaatattggacacattttatcctgatccacagtggagttttagtaattatattttgttgatttcttcattttgttttctggtataaaagtagagataatgtgtagtcacttctgatttagtgaaaccaattgtaataattgtggaaatgttttgtctttaagtgtaaatattttaaaatttgacataccctaatgttaataataaaaagaactatttgcatattgca

SEQ ID NO: 8755 - protein, 205 aa, Homo sapiens
MLKRKPSNVSEKEKHQKPKKGDIIDIICKTPMGMWTGMLNNKVGNFKFIYVDVISEEEAAPKKIKANRRSNSKKSKTLQEFLERIHLQEYTSTLLLNGYETLEDLKDIKESHLIELNIENPDDRRRLLSAAENFLEEEIIQEQENEPEPLSLSSDISLNKSQLDDCPRDSGCYISSGNSDNGKEDLESENLSDMVHKIIITEPSD

SEQ ID NO: 8756 - DNA, 1888 bp, Homo sapiens
attagacagcacactgctgactgttttcagttgtttctgtaacagcagaaagtgcactcactaggagtagtcagaattcaaaatgctcaagagaaagccatccaatgtttcagagaaggagaaacatcaaaaaccaaagcgaagcagcagttttgggaatttcgatcgttttcggaataattctttatcaaaaccagatgattcaactgaggcacatgaaggagatcccacaaatggaagtggagaacaaagtaaaacttcaaataatggaggcggtttgggtaaaaaaatgagagctatttcatggacaatgaagaaaaaagtgggtaaaaagtacatcaaagccctttctgaggaaaaggatgaggaagatggagagaatgcccacccatatagaaacagtgaccctgtgattgggacccacacagagaaggtgtccctcaaagccagtgactccatggatagtctctacagtggacagagctcatcaagtggcataacaagctgttcagatggtacaagtaaccgggacagctttcgactggatgacgatggcccctattcaggaccattctgtggccgtgccagagtgcatacggatttcacgccaagtccctatgacactgactccctcaaaatcaagaaaggagacatcatagacattatttgcaaaacaccaatggggatgtggacaggaatgttgaacaataaagtgggaaacttcaaattcatttatgtggatgtcatctcagaagaggaagcagcccccaagaaaataaaggcaaaccgaaggagtaacagcaaaaaatccaagactctgcaggagttcctagagaggattcatctgcaggaatacacctcaacacttttgctcaatggttatgagactctagaagatttaaaagatataaaagagagtcacctcattgaattaaatattgaaaacccagatgacagaagaaggttactatcagctgctgaaaacttccttgaagaagaaattattcaagagcaagaaaatgaacctgagcccctatccttgagctcagacatctccttaaataagtcacagttagatgactgcccaagggactctggttgctatatctcatcaggaaattcagataatggcaaagaggatctggagtctgaaaatctgtctgacatggtacataagattattatcacagagccaagtgactgaacacgcattcccaactatatatctacagatgcattccattttaactcttcttgagctaaaacgtcaaataggagaggaagataagataaatatttgtaaataaaacctaaagtttaaatgttttaatctgaataattgtacataaaattttgtatctctaacattccaaattactgtcaataaaatatatatttattattttaaatgctatgtgttaatatttcacttgcttgtattagaaaggcaaaatgtaagactttggtatgtgtgacatatgctttatttggctttattttacaagtacagtatctgcaaaaaacaaagtaaccttttttcatacctgccagttttgaatttatatatgttattgaacaaatagtaatagaggattcgctgttgaaacaagttgtccaagcaatgttatattcatttttatacttattgggaaagtgtgagttaatattggacacattttatcctgatccacagtggagttttagtaattatattttgttgatttcttcattttgttttctggtataaaagtagagataatgtgtagtcacttctgatttagtgaaaccaattgtaataattgtggaaatgttttgtctttaagtgtaaatattttaaaatttgacataccctaatgttaataataaaaagaactatttgcatattgca

SEQ ID NO: 8757 - protein, 373 aa, Homo sapiens; identical to SEQ ID NO: 1252

SEQ ID NO: 8758 - DNA, 2185 bp, Homo sapiens
ggaagctcagcagtgtccactgtcgccattccttggccatagaaaacaatgtatttgaattttgatgtaagcataacaaattgaagatgaagatgacacgttgatttcttgtttgaaattaaccaagtcccgagaaaagaaagtgaatagtgttagcacgaggaggaaggaagaaatggagattagattggatactctttctgcatcactgggtagatccagcactttaaataactgcaacttggaagataaattagcttggtatgaaggtgaagcttacatgtggcatcactggaagccttttcctgaaaaccctctctggacatgtcttgatttccaaatagcacaagttggaccctgggaccactgctcctcttgtattcgccacacacgtctcaagtcttcctgctcagatatggatctcctacattcatggcgaagcagcagttttgggaatttcgatcgttttcggaataattctttatcaaaaccagatgattcaactgaggcacatgaaggagatcccacaaatggaagtggagaacaaagtaaaacttcaaataatggaggcggtttgggtaaaaaaatgagagctatttcatggacaatgaagaaaaaagtgggtaaaaagtacatcaaagccctttctgaggaaaaggatgaggaagatggagagaatgcccacccatatagaaacagtgaccctgtgattgggacccacacagagaaggtgtccctcaaagccagtgactccatggatagtctctacagtggacagagctcatcaagtggcataacaagctgttcagatggtacaagtaaccgggacagctttcgactggatgacgatggcccctattcaggaccattctgtggccgtgccagagtgcatacggatttcacgccaagtccctatgacactgactccctcaaaatcaagaaaggagacatcatagacattatttgcaaaacaccaatggggatgtggacaggaatgttgaacaataaagtgggaaacttcaaattcatttatgtggatgtcatctcagaagaggaagcagcccccaagaaaataaaggcaaaccgaaggagtaacagcaaaaaatccaagactctgcaggagttcctagagaggattcatctgcaggaatacacctcaacacttttgctcaatggttatgagactctagaagatttaaaagatataaaagagagtcacctcattgaattaaatattgaaaacccagatgacagaagaaggttactatcagctgctgaaaacttccttgaagaagaaattattcaagagcaagaaaatgaacctgagcccctatccttgagctcagacatctccttaaataagtcacagttagatgactgcccaagggactctggttgctatatctcatcaggaaattcagataatggcaaagaggatctggagtctgaaaatctgtctgacatggtacataagattattatcacagagccaagtgactgaacacgcattcccaactatatatctacagatgcattccattttaactcttcttgagctaaaacgtcaaataggagaggaagataagataaatatttgtaaataaaacctaaagtttaaatgttttaatctgaataattgtacataaaattttgtatctctaacattccaaattactgtcaataaaatatatatttattattttaaatgctatgtgttaatatttcacttgcttgtattagaaaggcaaaatgtaagactttggtatgtgtgacatatgctttatttggctttattttacaagtacagtatctgcaaaaaacaaagtaaccttttttcatacctgccagttttgaatttatatatgttattgaacaaatagtaatagaggattcgctgttgaaacaagttgtccaagcaatgttatattcatttttatacttattgggaaagtgtgagttaatattggacacattttatcctgatccacagtggagttttagtaattatattttgttgatttcttcattttgttttctggtataaaagtagagataatgtgtagtcacttctgatttagtgaaaccaattgtaataattgtggaaatgttttgtctttaagtgtaaatattttaaaatttgacataccctaatgttaataataaaaagaactatttgcatattgca

SEQ ID NO: 8759 - protein, 441 aa, Homo sapiens
MEIRLDTLSASLGRSSTLNNCNLEDKLAWYEGEAYMWHHWKPFPENPLWTCLDFQIAQVGPWDHCSSCIRHTRLKSSCSDMDLLHSWRSSSFGNFDRFRNNSLSKPDDSTEAHEGDPTNGSGEQSKTSNNGGGLGKKMRAISWTMKKKVGKKYIKALSEEKDEEDGENAHPYRNSDPVIGTHTEKVSLKASDSMDSLYSGQSSSSGITSCSDGTSNRDSFRLDDDGPYSGPFCGRARVHTDFTPSPYDTDSLKIKKGDIIDIICKTPMGMWTGMLNNKVGNFKFIYVDVISEEEAAPKKIKANRRSNSKKSKTLQEFLERIHLQEYTSTLLLNGYETLEDLKDIKESHLIELNIENPDDRRRLLSAAENFLEEEIIQEQENEPEPLSLSSDISLNKSQLDDCPRDSGCYISSGNSDNGKEDLESENLSDMVHKIIITEPSD

SEQ ID NO: 8760 - DNA, 580 bp, Homo sapiens
ttattcaagagcaagaaaatgaacctgagcccctatccttgagctcagacatctccttaaataagtcacagttagatgactgcccaagggactctggttgctatatctcatcaggaaattcagataatggcaaagaggatctggagtctgaaaatctgtctgacatggtacataagattattatcacagagccaagtgactgaacacgcattcccaactatatatctacagatgcattccattttaactcttcttgagctaaaacgtcaaataggagaggaagataagataaatatttgtaaataaaacctaaagtttaaatgttttaatctgaataattgtacataaaattttgtatctctaacattccaaattactgtcaataaaatatatatttattattttaaatgctatgtgttaatatttcatttgttttctggtataaaagtagagataatgtgtagtcacttctgatttagtgaaaccaattgtaataattgtggaaatgttttgtctttaagtgtaaatattttaaaatttgacataccctaatgttaataataaaaagaactatttgcat

SEQ ID NO: 8761 - protein, 76 aa, Homo sapiens [sequence omitted]

SEQ ID NO: 8762 - DNA, 735 bp, Homo sapiens
attagacagcacactgctgactgttttcagttgtttctgtaacagcagaaagtgcactcactaggagtagtcagaattcaaaatgctcaagagaaagccatccaatgtttcagagaaggagaaacatcaaaaaccaaagcgaagcagcagttttgggaatttcgatcgttttcggaataattctttatcaaaaccagatgattcaactgaggcacatgaaggagatcccacaaatggaagtggagaacaaagtaaaacttcaaataatggaggcggtttgggtaaaaaaatgagagctatttcatggacaatgaagaaaaaagtgggtaaaaagtacatcaaagccctttctgaggaaaaggatgaggaagatggagagaatgcccacccatatagaaacagtgaccctgtgattgggacccacacagagaaggtgtccctcaaagccagtgactccatggatagtctctacagtggacagagctcatcaagtggcataacaagctgttcagatggtacaagtaaccgggacagctttcgactggatgacgatggcccctattcaggaccattctgtggccgtgccagagtgcatacggatttcacgccaagtccctatgacactgactccatgtggacaggaatgttgaacaataaagtgggaaacttcaaattcatttatgtggatgtcatctcagaagaggaagcagcccccaagaaaataaaggcaaaccg

SEQ ID NO: 8763 - protein, 216 aa, Homo sapiens
MLKRKPSNVSEKEKHQKPKRSSSFGNFDRFRNNSLSKPDDSTEAHEGDPTNGSGEQSKTSNNGGGLGKKMRAISWTMKKKVGKKYIKALSEEKDEEDGENAHPYRNSDPVIGTHTEKVSLKASDSMDSLYSGQSSSSGITSCSDGTSNRDSFRLDDDGPYSGPFCGRARVHTDFTPSPYDTDSMWTGMLNNKVGNFKFIYVDVISEEEAAPKKIKA

SEQ ID NO: 8764 - DNA, 742 bp, Homo sapiens
gagtagtcagaattcaaaatgctcaagagaaagccatccaatgtttcagagaaggagaaacatcaaaaaccaaagtggccattgatgatcattgcctggatccaacattgcattaggggtttgcaaaatgcgaagcagcagttttgggaatttcgatcgttttcggaataattctttatcaaaaccagatgattcaactgaggcacatgaaggagatcccacaaatggaagtggagaacaaagtaaaacttcaaataatggaggcggtttgggtaaaaaaatgagagctatttcatggacaatgaagaaaaaagtgggtaaaaagtacatcaaagccctttctgaggaaaaggtaaatattctctgataatcatttgtatttttctactaaaactttcttaaactattcagctagactatagaagtgcttggtactttatgaagtacttaagcatttgttttcttcctcagtcattatgcccagaacttgggtggaaggaagtattactttcattttaacagaagaaactgacactcagaaagatcatgcatctgctgggtgcagtggctcacacctgtaatccgagcactttggaggccgtggcgggaagatcacctgaagtcaggagttcaagaccagcctggccaacatggtgaaaccccgtctctactaaaaatacaaaaattagctgagcatggtggtgcacgcctgtagtcctagctactcaggaggctgaggaag

SEQ ID NO: 8765 - protein, 79 aa, Homo sapiens [sequence omitted]

SEQ ID NO: 8766 - DNA, 284 bp, Homo sapiens
agttgtttctgtaacagcagaaagtgcactcactaggagtagtcagaattcaaaatgctcaagagaaagccatccaatgtttcagagaaggagaaacatcaaaaaccaaaggctgaagggctcgtccagccggggtggcaagtcagcaaaaggcgttaattgtgtctaacacagctatcatccttggggcaatattctgtatcacactgtctatcaagctaaccccttgccagagcgaagcagcagttttgggaatttcgatcgttttcggaataattctttat

SEQ ID NO: 8767 - protein, 34 aa, Homo sapiens
MLKRKPSNVSEKEKHQKPKAEGLVQPGWQVSKRR

SEQ ID NO: 8768 - DNA, 669 bp, Homo sapiens
gcagtggtcccagggtccaacttgtgctatttggaaatcaagacatgtccagagagggttttcaggaaaaggcttccagtgatgccacatccaaagcttaattgctccactgaaacactggcaacaaaaatcgtcttctcttctccctttgtgaaaaaggctttcacttaatgtggagaaaggtattatataccagggaaatggaactttgtataaatgattttcccccaagaggaactaaagcatttggaaggtatctgaattcagatgaggacctaatttattactgaggacctaatctacgggaggtgcaaagaagaatgaaatattgtgtctgcctgtgatgcacattgcttaatatgaatactaagaaaaatagtcatctgtttctgttcctgtccccctcactgcaagggcacttcaggactgcagcaaagggcatttgatggagtctataacagaaaagaaagtcctcctctggaatttctgactatatttcattggccacaactggattccatggccacccctaactactggggaggctgagaattcaaatgctgaaaattgcaatctccatagtgaaagacacgaagaaagaaattgattgaaatgggttacttaattcaattagcaacactttttctcagcaaaggagctgagaaagaa

SEQ ID NO: 8769 - protein, 39 aa, Homo sapiens
MWRKVLYTREMELCINDFPPRGTKAFGRYLNSDEDLIYY

SEQ ID NO: 8770 - DNA, 3947 bp, Homo sapiens
cagttcttaaattagcaagccttcaaaaccaaaaatggggtcgaaaagaggcatatcttctaggcatcattctctcagctcctatgaaatcatgtttgcagctctctttgccatattggtagtgctctgtgctggattaattgcagtatcctgcctgacaatcaaggaatcccaacgaggtgcagcacttggacagagtcatgaagccagagcgacatttaaaataacatccggagttacatataatcctaatttgcaagacaaactctcagtggatttcaaagttcttgcttttgaccttcagcaaatgatagatgagatctttctatcaagcaatctgaagaatgaatataagaactcaagagttttacaatttgaaaatggcagcattatagtcgtatttgaccttttctttgcccagtgggtgtcagatgaaaatgtaaaagaagaactgattcaaggccttgaagcaaataaatccagccaactggtcactttccatattgatttgaacagcgttgatatcctagacaagctaacaaccaccagtcatctggcaactccaggaaatgtctcaatagagtgcctgcctggttcaagtccttgtactgatgctctaacgtgtataaaagctgatttattttgtgatggagaagtaaactgtccagatggttctgacgaagacaataaaatgtgtgccacagtttgtgatggaagatttttgttaactggatcatctgggtctttccaggctactcattatccaaaaccttctgaaacaagtgttgtctgccagtggatcatacgtgtaaaccaaggactttccattaaactgagcttcgatgattttaatacatattatacagatatattagatatttatgaaggtgtaggatcaagcaagattttaagagcttctatttgggaaactaatcctggcacaataagaattttttccaaccaagttactgccacctttcttatagaatctgatgaaagtgattatgttggctttaatgcaacatatactgcatttaacagcagtgagcttaataattatgagaaaattaattgtaactttgaggatggcttttgtttctgggtccaggatctaaatgatgataatgaatgggaaaggattcagggaagcaccttttctccttttactggacccaattttgaccacacttttggcaatgcttcaggattttacatttctaccccaactggaccaggagggagacaagaacgagtggggcttttaagcctccctttggaccccactttggagccagcttgccttagtttctggtatcatatgtatggtgaaaatgtccataaattaagcattaatatcagcaatgaccaaaatatggagaagacagttttccaaaaggaaggaaattatggagacaattggaattatggacaagtaaccctaaatgaaacagttaaatttaaggttgcttttaatgcttttaaaaacaagatcctgagtgatattgcgttggatgacattagcctaacatatgggatttgcaatgggagtctttatccagaaccaactttggtgccaactcctccaccagaacttcctacggactgtggaggaccttttgagctgtgggagccaaatacaacattcagttctacgaactttccaaacagctaccctaatctggctttctgtgtttggattttaaatgcacaaaaaggaaagaatatacaacttcattttcaagaatttgacttagaaaatattaacgatgtagttgaaataagagatggtgaagaagctgattccttgctcttagctgtgtacacagggcctggcccagtaaaggatgtgttctctaccaccaacagaatgactgtgcttctcatcactaacgatgtgttggcaagaggagggtttaaagcaaactttactactggctatcacttggggattccagagccatgcaaggcagaccattttcaatgtaaaaatggagagtgtgttccactggtgaatctctgtgacggtcatctgcactgtgaggatggctcagatgaagcagattgtgtgcgttttttcaatggcacaacgaacaacaatggtttagtgcggttcagaatccagagcatatggcatacagcttgtgctgagaactggaccacccagatttcaaatgatgtttgtcaactgctgggactagggagtggaaactcatcaaagccaatcttccctaccgatggtggaccatttgtcaaattaaacacagcacctgatggccacttaatactaacacccagtcaacagtgtttacaggattccttgattcggttacagtgtaaccataaatcttgtggaaaaaaactggcagctcaagacatcaccccaaagattgttggaggaagtaatgccaaagaaggggcctggccctgggttgtgggtctgtattatggcggccgactgctctgcggcgcatctctcgtcagcagtgactggctggtgtccgccgcacactgcgtgtatgggagaaacttagagccatccaagtggacagcaatcctaggcctgcatatgaaatcaaatctgacctctcctcaaacagtccctcgattaatagatgaaattgtcataaaccctcattacaataggcgaagaaaggacaacgacattgccatgatgcatctggaatttaaagtgaattacacagattacatacaacctatttgtttaccggaagaaaatcaagtttttcctccaggaagaaattgttctattgctggttgggggacggttgtatatcaaggtactactgcaaacatattgcaagaagctgatgttcctcttctatcaaatgagagatgccaacagcagatgccagaatataacattactgaaaatatgatatgtgcaggctatgaagaaggaggaatagattcttgtcagggggattcaggaggaccattaatgtgccaagaaaacaacaggtggttccttgctggtgtgacctcatttggatacaagtgtgccctgcctaatcgccccggagtgtatgccagggtctcaaggtttaccgaatggatacaaagttttctacattagcgcatttcttaaactaaacaggaaagtcgcattattttcccattctactctagaaagcatggaaattaagtgtttcgtacaaaaattttaaaaagttaccaaaggtttttattcttacctatgtcaatgaaatgctagggggccagggaaacaaaattttaaaaataataaaattcaccatagcaatacagaataactttaaaataccattaaatacatttgtatttcattgtgaacaggtatttcttcacagatctcatttttaaaattcttaatgattatttttattacttactgttgtttaaagggatgttattttaaagcatataccatacacttaagaaatttgagcagaatttaaaaaagaaagaaaataaattgtttttcccaaagtatgtcactgttggaaataaactgccataaattttctagttccagtttagtttgctgctattagcagaaactcaattgtttctctgtcttttctatcaaaattttcaacatatgcataaccttagtattttcccaaccaatagaaactatttattgtaagcttatgtcacaggcctggactaaattgattttacgttcctcttaaataagttaattaaataaaagataaattaactgatatagtcattgtatattagataaattttacctatttatttcaagcaagtatttttaagtctcaagaaaataatcagacataccaaagaaatgcacctattgcaaatcctggtcttggtttatgtgtgttacagtggatatttctaatatatgaaaacttatttagacacagctgaatcacccatgagaaggtcaaatatgtgtaataaatgaatttgcttca

SEQ ID NO: 8771 - protein, 1019 aa, Homo sapiens
MGSKRGISSRHHSLSSYEIMFAALFAILVVLCAGLIAVSCLTIKESQRGAALGQSHEARATFKITSGVTYNPNLQDKLSVDFKVLAFDLQQMIDEIFLSSNLKNEYKNSRVLQFENGSIIVVFDLFFAQWVSDENVKEELIQGLEANKSSQLVTFHIDLNSVDILDKLTTTSHLATPGNVSIECLPGSSPCTDALTCIKADLFCDGEVNCPDGSDEDNKMCATVCDGRFLLTGSSGSFQATHYPKPSETSVVCQWIIRVNQGLSIKLSFDDFNTYYTDILDIYEGVGSSKILRASIWETNPGTIRIFSNQVTATFLIESDESDYVGFNATYTAFNSSELNNYEKINCNFEDGFCFWVQDLNDDNEWERIQGSTFSPFTGPNFDHTFGNASGFYISTPTGPGGRQERVGLLSLPLDPTLEPACLSFWYHMYGENVHKLSINISNDQNMEKTVFQKEGNYGDNWNYGQVTLNETVKFKVAFNAFKNKILSDIALDDISLTYGICNGSLYPEPTLVPTPPPELPTDCGGPFELWEPNTTFSSTNFPNSYPNLAFCVWILNAQKGKNIQLHFQEFDLENINDVVEIRDGEEADSLLLAVYTGPGPVKDVFSTTNRMTVLLITNDVLARGGFKANFTTGYHLGIPEPCKADHFQCKNGECVPLVNLCDGHLHCEDGSDEADCVRFFNGTTNNNGLVRFRIQSIWHTACAENWTTQISNDVCQLLGLGSGNSSKPIFPTDGGPFVKLNTAPDGHLILTPSQQCLQDSLIRLQCNHKSCGKKLAAQDITPKIVGGSNAKEGAWPWVVGLYYGGRLLCGASLVSSDWLVSAAHCVYGRNLEPSKWTAILGLHMKSNLTSPQTVPRLIDEIVINPHYNRRRKDNDIAMMHLEFKVNYTDYIQPICLPEENQVFPPGRNCSIAGWGTVVYQGTTANILQEADVPLLSNERCQQQMPEYNITENMICAGYEEGGIDSCQGDSGGPLMCQENNRWFLAGVTSFGYKCALPNRPGVYARVSRFTEWIQSFLH

SEQ ID NO: 8772 - DNA, 449 bp, Homo sapiens
atcagttgaaggtgactgaatagaacaatagatagatctcacatgagtgagaggaattctacagcaggtagtctttgcctttgaactgcagcatgaactctcctctgggtctcccacctgccagcccaccctgcagagtttgcatttgctagcctccacaatcggaaatggcagcattatagtcgtatttgaccttttctttgcccagtgggtgtcagatgaaaatgtaaaagaagaactgattcaaggccttgaagcaaataaatccagccaactggtcactttccatattgatttgaacagcgttgatatcctaggaaatgtctcaatagagtgcctgcctggttcaagtccttgtactgatgctctaacgtgtataaaagctgatttattttgtgatggagaagtaaactgtccagatggttctgacgaagacaataaaatgtgtg

SEQ ID NO: 8773 - protein, 31 aa, Homo sapiens
TLLWVSHLPAHPAEFAFASLHNRKWQHYSRI

SEQ ID NO: 8774 - DNA, 455 bp, Homo sapiens
tctgcattttttcgtgtgacttgaaataacaattagaagtcatcaaaggccatcacatttatagatagaaagttcatacaaatgatagagtccattattataagatatcatttctcctttagggcttttagttgcaagtaacaaacatggaaatttaactgaaactggcttgaacagaaaaggagtagagaagggactcatgtaattcaggtcatgtagggtcttattaagaaactcaagtgacagacacagtcatagctgggcttagatcttttctcttccaggctggctttactcatggcactggtttctaggagctccaggatggcattcatcaaagtgcaaatcttgcccaaagtgacacaggtagttattaaaagaagttactacatgtcttctgagatccctccttgttccacagttcgtagaagaacatgtttccattttcttgctct

SEQ ID NO: 8775 - protein, 51 aa, Homo sapiens
MALVSRSSRMAFIKVQILPKVTQVVIKRSYYMSSEIPPCSTVRRRTCFHFL

SEQ ID NO: 8776 - DNA, 496 bp, Homo sapiens
actgccatcgtcatcttggcctgttcttgatggtcgctgtctcttcggagctgttgggtacacctgcagaccttttgttctaagtgaatcttggctctgctgagaatgcttctctttcaatcctctcaaatgctaatgtttttttctatcttacattcttcatacggatatcagataatgaagacaggagttatgtgaacctgcttttgggacttgggtagagtgtgataccagctgcttttctcctcaccataaatgctttctcccgctttggaggtcccttcctggttgccaaaatggtggcgagccacttccaagatggtggcaagccgcttctaagatggtggcaagcctcaggttctctaacctggggttcttggcctcacagattccaaggaatggaatcttgggccatgtggtgagtgttatagctctgtcagaagccgtgggtcacggaagagaaccgtggaacccagtgactactgtttagcttgat

SEQ ID NO: 8777 - protein, 30 aa, Homo sapiens
MLLFQSSQMLMFFSILHSSYGYQIMKTGVM

SEQ ID NO: 8778 - DNA, 730 bp, Homo sapiens
attcattcacagctatgaggtgtcctctgggagataggccttagattggacctatgtcttagtccattttgtgctgccataacagaatagcacaaactgggtaatcctcaaagaacggagatttatttcttatagttctgaagcctgggtagtccaagatcaaaggactggtatctggtgagggccttcttgctgcatcatcctataatggaaggtgaaagggaaaaagtcccggatatcagataatgaagacaggagttatgtgaacctgcttttgggacttgggtagagtgtgataccagctgcttttctcctcaccataaatgctttctcccgggggtccttgctcacagagctcctcagatggtggcgagccacttccaagatggtggtaggccacttccaagatggtggctagcctcgtgttctctgacctggggttcttggcctcacagattccaaggaatggaatcttgggccgtgcggtgagtgttatagctctattagaagccatgggtcatggaagagaaccgtggaacccagtgactagtgttcagctcaattaggatgaacctgggcacttagccgtgcaggaacaacggcaagcctttagcccaatcaggattggcaatgggtgcctcgctggttcaggagcacagcggacagcctgccggatccggagggatgggagtcagtggcaggtcgctttggaggtcccttcctggttgcc

SEQ ID NO: 8779 - protein, 32 aa, Homo sapiens
MGASLVQEHSGQPAGSGGMGVSGRSLWRSLPG

SEQ ID NO: 8780 - DNA, 871 bp, Homo sapiens
caggagagaggaaagtgacaatgaacattaaagctgaactcctgcattctctctcaatggagcatgaaataaggcatgtcatcatgtcagcgtatgctaggaaggatttgcttagaccccggtccttttagtatgatgcagctatgacattcagtcttcaactcactttgtgctgatggtgtccaactcaagcccacacatgatacttttccttattctcccagaagtctctacactgctgaagtatggggttaaaatagaagattgttgacagatagcatactggatgtaaaggagcacatcttgggacaaaaagaagagctctgaagaataatatttcttgacagataaaaattatctgaaatgcaagtttctgtgtccataaataatgttttattgaaacacagtcatgcctcttcatgtctatattgtctgtggttccctctacactacaacatcaagtccagcagttgcaatggagatatctggcctgcaaagttcaaagtatttactattttgtcatgtaagaaaaagttcactgattccttgcctacaatgctcaccaggaaagcattgtttatattgagttgggcatataaaattaacacgtttttattttgcacatagataacaattattgtcaaagaatcctgagggatataaaatataggacagaaatctgggccttgaattacacctcaaaactagcaatcattaacaaatgagaacagctaacaactaaaatatgagtattgattttatatgcaatagcgtttaaaataaaggatcagatcaatgttgaaatatacgaggaaaatttcatgcagaggaaatggttgtgcttttaaggctgggatcttttggttagatg

SEQ ID NO: 8781 - protein, 87 aa, Homo sapiens [sequence omitted]

SEQ ID NO: 8782 - DNA, 601 bp, Homo sapiens
ctccctgtgcctcaggttcttgcagagtggaaatgcccacttcacagaatggctgagggtgtggatgaacggtggacgctcctgcccggcacccatgggtgctcacgacgattgtgttttactgttggctgcaatatgtcatgacttatcatgtgtgatccttgagtgaataggcagctgcgagcctgagcggactcctatgaaccagtcttctccagcaatagaccctccttcaactcgtggtagcctgtacgccaagggtgacagactggaaagcaggatccaccggttcatctatgggaaaaggagggggaatgagatcaaggattgaggacgctaatggagatggggtttcaccatgttgcccaggctggtcttgaactcctagactcaagtgatccactcgccttggcctcccaaaatgctggaattacaggagaaaagcagtccttctggtactggctgggtgtggtggctcacacctgtaatctcagcactttgggaggccaagacaggagaattgcttgagtccaggagattgagaccagcctgagcaacctacggagacccccctctctaccaaaaaaaaaaaaaaaaaaaa

SEQ ID NO: 8783 - protein, 62 aa, Homo sapiens
MEMGFHHVAQAGLELLDSSDPLALASQNAGITGEKQSFWYWLGVVAHTCNLSTLGGQDRRIA

SEQ ID NO: 8784 - DNA, 582 bp, Homo sapiens
cctccctgtgcctcaggttcttgcagagtggaaatgcccacttcacagaatggctgagggtgtggatgaacggtggacgctcctgcccggcacccatgggtgctcacgacgattgtgttttactgttggctgcaatatgtcatgacttatcatgtgtgatccttgagtgaataggcagctgcgagcctgagcggactcctatgaaccagtcttctccagcaatagaccctccttcaactcgtggtagcctgtacgccaagggtgacagactggaaagcaggatccaccggttcatctatgggaaaaggagggggaatgagatcaaggattgaggacgctaatggagatggggtttcaccatgttgcccaggctggtcttgaactcctagactcaagtgatccactcgccttggcctcccaaaatgctggaattacaggagaaaagcagtccttctggtactggctgggtgtggtggctcacacctgtaatctcagcactttgggaggccaagacaggagaattgcttgagtccaggagattgagaccagcctgagcaacctacggagacccccctctctacc

SEQ ID NO: 8785 - protein, 62 aa, Homo sapiens; identical to SEQ ID NO: 8783

SEQ ID NO: 8786 - DNA, 1833 bp, Homo sapiens
agcaggaggagagctggcgggaagacatgcaccccttgaagacccagagagaggccgtctgtctaccgcgtagcagttacatcagactgagacacttcctgtttacaggagactataaaattcctgccccgtgctcatttggggctgacgccattttaggcctcagcccatctgcacccaggcgctcactgaaacagtgtgttgctccacaccgccttgttttgcttgttggcgcgctctcagggttccgaccaatccaagagccttgcagaaagcattaacgtgcttttctctttggcagagtttttctttgctctgatcttggagacatccctctgcctagtggaaacataaggaatacagaaagaatgcaaggagatagaccaacgtgagattctccttcatgcactcaagagaaagatgttgcaggaagagctagtctttcaggctgggctggtgacctgagaaagaatgtccagcttttcttctccacttggcatatcaagagccaggcgtggaagactaaaacaggaaatgtttataaaaactgttcagcggttcgccaacaagaagtggtaaagtagcaaaaatggggatggagatgccaggaggaaagatgccaggggtaaagtgggaaaatgggaacctgaagccaggaggtcaagccaagccaacaggtgttctgtttttcaatgaggaggtggggcacaggatggatggaaactttccacagtcacagaactaataagtggtgctgaggactcaaacccggggaagcccactctagaacccatgctggtcatccatatccccaaggccctggtcagaacacagctaagcagatggcttgggtcatcaggacgtccattacatccaaaggaagacagcctgtgacgtttcaaaagcaaaagtcccctaccagccagtgaagctacctgatttctcagtatcttacgcccagtgacacgatctaccctcaaaacttaaaaaaaaaagggaaacataaacacataacagcagcagcaataattaaagatgagatgagaacaattaagaaaaaaggaaaggtctcctgtgactgttttatttttagggaaacagagaggaagaagaatgatttttcttttgatgactctatatccaactctgaggtttgattaaagaaatgaccttgaaccacagcaaagaaaaataaaagacaatttccagtaagtatgccagttcgaattaatgatttactttttatttttaaactgaattcagcagagatttacatgcattacgatgattaacatctgaaatttgaccttgaaataatctttacattgtaaattcttaatgatcaaaacaaggttctcagtgattaaaacatattagtaattaattattaaaggagaataattgcaaatacaacattcctaaaatctcaaggcttttaaagcatttgtacaaatgactggacattttttaaatttgaaaaaaaaaaaaagccctccatctgattctcattttcattgtcagtgcaacaacaaaaaaggtatgcacttctcttctcattttccactgtctcgcaagctagaaattctcacgactacctttgatcccatcaaagccaaagaaagaaaagaaaattgttctgtacagatatatgacattaaaaaataatcccaaaaacttcttctctaaggttaataaaaggtcggcagttttgatcacttttaaaaatcaatttataaataatttagtcacttgtagatgggacatgatcttcctgctatccctaactactctgatgccaaaactggtcatagcacaagtggggctgcatagcaa

SEQ ID NO: 8787 - protein, 51 aa, Homo sapiens
MGMEMPGGKMPGVKWENGNLKPGGQAKPTGVLFFNEEVGHRMDGNFPQSQN

SEQ ID NO: 8788 - DNA, 3361 bp, Homo sapiens
aaatctacctatagtccttgtttctggaggttgttgccatggtgagatttgatttcatgtatgttcttttgtgatctattaacctagccatcatcattgattttattatttttgagtcagagtcgcactctgttgctcaggctggagtgcagtggtgtaatcttggctcgttggaacctccgcctcccaggttcaggtgattcttgtgccttagcctctggagtagctgggattacaggcacgcaccaccatgcctggctacttttgtaattttagtagagacggggtttcgccgtgttggccaggctggtcttgaactctggcctcaagtgatctacctgtctcagcctcccaaagtgctaggattgtaggagtgagccactgtgcctggcctggttttattattactatttttaatatttgttttttcatatgatagagacagtgtcttgttatgttgcccaggctggtcttcaactcctgggctcgagatcctcctgcctcaacctcccagagtgttggtattataggcgggagctaccgtgcttggcccagttttattattttaaaatagtaagttagccattacacttaagatgtgaaaattccaaatatagtgttaaaaaagtacatagaagactgatttttccctttctgaaactgtagagaagcagttttctaggccatgaaaaaacggcaagagccttattaaatatataatttgaagcatttttaaatatagatttgattggagatagaaacttggccaagctgttactactccatcttataggcagaataataatgtgatttctcaaaataaaaatagaaaagcaaaaactgggtcttgctgctagaaaaccagcttcgagattggcttcatgttttcaaaatcctgataaatttaatattgatgtccgcgaagtattcatttgttgaataaattaatttgagcaaaaattatattttagttatatttacatttttaaaataaaatagaaaaatcccttattaccctgcttctccaaatagctctgttaatttgtgcatatttactttaagttttttgtagttgcagtcactaatatccagactgctttgaattctggtttggaaaaagctcagtattgtaaacctttcctcatgtttttgcagggcctctacttttgttgactgtaaattttcaacagtcatgctgatgtcctaatgacctgcttgtttttggtggatttacttagtgggagcaggagctgaggttatgcgtgtttagtcctccagccttgaaattcttacagcctttcagggactcagtactgatgtgactgaattggacttgaagagtagatttcctttgtgtgaattaggtggaactgtttatgcatgtctgggttgctaaagggaaaggaagtgagttgagaagggaagggagacatacttttgtccaaatttatgccctaacagtctgatttttttttttgaatatagaaatacttgttaaatatcttccatcaacagataaacagatggacaaaaagatttctattttaaaggatcatggctatatagaaaatttgacatttggatgggatggaccatcttggaggctactcacagcccttaagttgttatgtctggaagctgagaaatttacatgctggaaaaaagtacttcttggggaggtaatttcagatacgaatgagaagacaagtttggacatagcccagaaaatatgctattatttcatagaagagactaatgctgtgcttcaaaaggtgtctcatatgaaggatgaaaaagaggccctgataaaccaactaactttggtggaatccttgtggacggaagagctaaagattctcagggcatctgccgagaccctgcacagtttgcaaacagcttttacctgatttcaccgaagcgcatttggtcacctcctctgaaacaaaagttaattttgaagagcatcatcatgggctggggtggtggctgcccccaggacatgcaggatttctgcagggggcagcacaggttctgggattgtgaggctgtgagtgaaggtggacaagctgtctggatggcaggtctaatgctcttccgaataaagtgctgaactgtgaggagagaggcggactgtgaggcagccaggagccagctgcgtccgtgtgtggtctgtcaccacggggcctgcttcttatctgacacagcagctatcagagtctagtggttgtgcttttaagatgctctgataccattgggttaaggggcagattggcggtgggtgtggggcagtgtgaggtagtcctggatccccgccagggtggcccagacgccagcccttccctgtgtggctgcactgaggtgggtgttgaagagccccctaggggacacacagcttccaggaggagggaatgtcctctaagcatgctcctggcctctcaaggtggcgcttgtctaattattcacttgggaagaatgactagctcagccagcggctctttctgctttgttctggcgactttcctgggcaggcctttccacctggggagctggctcatcctgcacagctgggccgtggtgggcctgtctgcttgattctggggttcagtgtaggtcagctgatggcgaaccatggtggtggtttggcttctgttcttattcttgagttttgataccacgcagaccttgggtggggagagcttcctgcacagctctcagcggcctgtggccttggaactgcctgcgtaagtaacggaggggctgctggtcctgttcaggcccgtgctggggacgccgcttagacaatgttgcccagagtcctgtttaccctcccagggttcattcttcccaagaactcaaattcctttctcattggagcctagtgaaaccaaatgaacgggacctgctggcctcaggaggcaggcagagtttaaaataaaactttctcatgatttcttgaacatctttccctgtttgtatatacactttgtgtttatttttcagtagctgcagtatattttttttcaatattcagtataatgcagtgtatttcatcatatgctgtatggagagtgggcagacttctgtggagggcccgatagtaaccatttgaagctttctggacctgtggtcttagtcccagcgattctgcagagcggccatcggcagcatgtcaaccatttgcatggctgggctccagggaaactactgacaacgacaggtggtgggccatagtttcctgacccctgtgctatgccagaatttctttttcctcttccctatgagtggacctaaatatgttaattccttttcacctttcaaaacggacagccccttgaacattaaaaacttcgcagaccctaca

SEQ ID NO: 8789 - protein, 127 aa, Homo sapiens [sequence omitted]

SEQ ID NO: 8790 - DNA, 4274 bp, Homo sapiens
ttcatcagcgtaaaaagaactgagtttaggtcgcaggtcccctccagggcaggcattatcgtgtgcgctgcagtaacctctcatcttgtggagtcctacacttagcgcatgttgctccggcgcgctgcgtaaagctgaggagcctgaggcccgaggtccgatgctcgcctggctggcctatggctgcgggagcggtgtgtgtcggaccgtaggacggcctcacggctagagtttgaggactatgggggcggggacggtgcctgtgtctgtggcggtcaccgggcttcacgtggtcctcagcagggtgatggtggacagctcgcgcgagggcccgggagtcttggggacacttcccggcgcggtctgtggactgagcgctgggacccgcaccgaaccagccgccgttcgcctctggagctggacatgccgactttcgttaggtcaaataatgaaccttatactgcggaagtgcggtattaatattgcctggagttcttgtctcttgctcatttctgccctcgtatgttttagaagtagatttattttttatttttatttttttaatttattttttgtgacagagtctcgctctgtcgcccaggttggagtgcagtggcgtgatctcgtctagctgcagcttccgcctcctgagatcaagcgattctcctgcctcagcctccccagtagctggtattacaggtgcctgccaccacgcccggctgatttttgtatttttagtagagacggggtttcaccatgttggccaggctggtcttgaactcctgacctcagcccgcctcgggctcccaaagtgctggttttacaggcgtgagccactgtacccagccattattttatttttatttatgtatttatttttttatttttttgagacggagcctcgctctgtcgcccaggctggagtgcagtagcgcgatctcggctcactgcaacctccgcctcccaggttcaagcgattctcctgcctcagcctcccaagtagctgggattacaggcgtgtgccaccacgcctagctattttttgtatttttagtagattaagctgtagtcactaggtctgcaagataaaactgttttagagggactgatataatgggaattctgttactgtagggatcatgatttagctcacagtataaacgtttcatgtacaaaagcacttgagagaaacagtttaccaaaacatacatttgtatacttaaaggtacaaagaacagtgattatcatataactggaaagtaaatcaaagaaatgttttttattttagattgagcatttccacagaaattacagttttgtcctttttgaaaaaatagaactgtatttcagaaaaaagaaactacagttttagcatgcagaaaggaaaagggagaacaagccggatcagaagacgaaaactctgcggaagttctgaatcaagaggagtgaatgagagccacaagtctgaatttatagagctgaggaagtggctgaaagctaggaagtttcaagattcaaacttagcgcctgcttgttttccaggtacaggaagagggctgatgagtcaaacatccctgcaggagggacagatgattatttcgttgcctgagagttgcctgctcaccacggacacagtgattcgaagctacttaggggcatacattactaagtggaagcctcctccatctcctctgctggcgctgtgcacctttttagtttcagaaaagcatgctgggcaccgatctctttggaagccttacctggagattttacccaaggcgtatacctgccctgtttgtttggagccggaagtggtgaaccttcttcccaaatctttaaaagcaaaggctgaagagcagagagcccacgtgcaggagttctttgcttcctccagagactttttctcttctctgcagcctctgtttgcggaggctgttgacagcatcttcagctacagtgccctgctgtgggcttggtgcaccgtcaacaccagagccgtgtacctgaggcccaggcagcgggaatgcctttctgcagagccggacacctgtgcactcgctccgtacctggacctgctgaatcatagcccacatgtccaggtaaaagcagcgtttaatgaagaaactcattcttacgaaattagaacgacttcacgttggagaaagcatgaagaggtattcatctgttacggccctcacgataatcaacggctgttcctggaatacggatttgtttctgtccataatcctcatgcttgtgtttatgtctcaagagaaatacttgttaaatatcttccatcaacagataaacagatggacaaaaagatttctattttaaaggatcatggctatatagaaaatttgacatttggatgggatggaccatcttggaggctactcacagcccttaagttgttatgtctggaagctgagaaatttacatgctggaaaaaagtacttcttggggaggtaatttcagatacgaatgagaagacaagtttggacatagcccagaaaatatgctattatttcatagaagagactaatgctgtgcttcaaaaggtgtctcatatgaaggatgaaaaagaggccctgataaaccaactaactttggtggaatccttgtggacggaagagctaaagattctcagggcatctgccgagaccctgcacagtttgcaaacagcttttacctgatttcaccgaagcgcatttggtcacctcctctggtgggtgttagtcacacattttagactaaggtttgatggactaaatttatatagtttagagtcgatgagttgtgtctactcaacaattaggaacttaatccttttccttttgcttttcctacagaaacaaaagttaattttgaagagcatcatcatgggctggggtggtggctgcccccaggacatgcaggatttctgcagggggcagcacaggttctgggattgtgaggctgtgagtgaaggtggacaagctgtctggatggcaggtctaatgctcttccgaataaagtgctgaactgtgaggagagaggcggactgtgaggcagccaggagccagctgcgtccgtgtgtggtctgtcaccacggggcctgcttcttatctgacacagcagctatcagagtctagtggttgtgcttttaagatgctctgataccattgggttaaggggcagattggcggtgggtgtggggcagtgtgaggtagtcctggatccccgccagggtggcccagacgccagcccttccctgtgtggctgcactgaggtgggtgttgaagagccccctaggggacacacagcttccaggaggagggaatgtcctctaagcatgctcctggcctctcaaggtggcgcttgtctaattattcacttgggaagaatgactagctcagccagcggctctttctgctttgttctggcgactttcctgggcaggcctttccacctggggagctggctcatcctgcacagctgggccgtggtgggcctgtctgcttgattctggggttcagtgtaggtcagctgatggcgaaccatggtggtggtttggcttctgttcttattcttgagttttgataccacgcagaccttgggtggggagagcttcctgcacagctctcagcggcctgtggccttggaactgcctgcgtaagtaacggaggggctgctggtcctgttcaggcccgtgctggggacgccgcttagacaatgttgcccagagtcctgtttaccctcccagggttcattcttcccaagaactcaaattcctttctcattggagcctagtgaaaccaaatgaacgggacctgctggcctcaggaggcaggcagagtttaaaataaaactttctcatgatttcttgaacatctttccctgtttgtatatacactttgtgtttatttttcagtagctgcagtatattttttttcaatattcagtataatgcagtgtatttcatcatatgctgtatggagagtgggcagacttctgtggagggcccgatagtaaccatttgaagctttctggacctgtggtcttagtcccagcgattctgcagagcggccatcggcagcatgtcaaccatttgcatggctgggctccagggaaactactgacaacgacaggtggtgggccatagtttcctgacccctgtgctatgccagaatttctttttcctcttccctatgagtggacctaaatatgttaattccttttcacctttcaaaacggacagccccttgaacattaaaaacttcgcagaccctaca

SEQ ID NO: 8791 - protein, 440 aa, Homo sapiens; identical to SEQ ID NO: 1266

SEQ ID NO: 8792 - DNA, 2763 bp, Homo sapiens
actgcagcctccatcttggaagcggccgccggcgcctagaactgtatttcagaaaaaagaaactacagttttagcatgcagaaaggaaaagggagaacaagccggatcagaagacgaaaactctgcggaagttctgaatcaagaggagtgaatgagagccacaagtctgaatttatagagctgaggaagtggctgaaagctaggaagtttcaagattcaaacttagcgcctgcttgttttccaggtacaggaagagggctgatgagtcaaacatccctgcaggtggaagcctcctccatctcctctgctggcgctgtgcacctttttagtttcagaaaagcatgctgggcaccgatctctttggaagccttacctggagattttacccaaggcgtatacctgccctgtttgtttggagccggaagtggtgaaccttcttcccaaatctttaaaagcaaaggctgaagagcagagagcccacgtgcaggagttctttgcttcctccagagactttttctcttctctgcagcctctgtttgcggaggctgttgacagcatcttcagctacagtgccctgctgtgggcttggtgcaccgtcaacaccagagccgtgtacctgaggcccaggcagcgggaatgcctttctgcagagccggacacctgtgcactcgctccgtacctggacctgctgaatcatagcccacatgtccaggtaaaagcagcgtttaatgaagaaactcattcttacgaaattagaacgacttcacgttggagaaagcatgaagaggtattcatctgttacggccctcacgataatcaacggctgttcctggaatacggatttgtttctgtccataatcctcatgcttgtgtttatgtctcaagagaaatacttgttaaatatcttccatcaacagataaacagatggacaaaaagatttctattttaaaggatcatggctatatagaaaatttgacatttggatgggatggaccatcttggaggctactcacagcccttaagttgttatgtctggaagctgagaaatttacatgctggaaaaaagtacttcttggggaggtaatttcagatacgaatgagaagacaagtttggacatagcccagaaaatatgctattatttcatagaagagactaatgctgtgcttcaaaaggtgtctcatatgaaggatgaaaaagaggccctgataaaccaactaactttggtggaatccttgtggacggaagagctaaagattctcagggcatctgccgagaccctgcacagtttgcaaacagcttttacctgatttcaccgaagcgcatttggtcacctcctctgaaacaaaagttaattttgaagagcatcatcatgggctggggtggtggctgcccccaggacatgcaggatttctgcagggggcagcacaggttctgggattgtgaggctgtgagtgaaggtggacaagctgtctggatggcaggtctaatgctcttccgaataaagtgctgaactgtgaggagagaggcggactgtgaggcagccaggagccagctgcgtccgtgtgtggtctgtcaccacggggcctgcttcttatctgacacagcagctatcagagtctagtggttgtgcttttaagatgctctgataccattgggttaaggggcagattggcggtgggtgtggggcagtgtgaggtagtcctggatccccgccagggtggcccagacgccagcccttccctgtgtggctgcactgaggtgggtgttgaagagccccctaggggacacacagcttccaggaggagggaatgtcctctaagcatgctcctggcctctcaaggtggcgcttgtctaattattcacttgggaagaatgactagctcagccagcggctctttctgctttgttctggcgactttcctgggcaggcctttccacctggggagctggctcatcctgcacagctgggccgtggtgggcctgtctgcttgattctggggttcagtgtaggtcagctgatggcgaaccatggtggtggtttggcttctgttcttattcttgagttttgataccacgcagaccttgggtggggagagcttcctgcacagctctcagcggcctgtggccttggaactgcctgcgtaagtaacggaggggctgctggtcctgttcaggcccgtgctggggacgccgcttagacaatgttgcccagagtcctgtttaccctcccagggttcattcttcccaagaactcaaattcctttctcattggagcctagtgaaaccaaatgaacgggacctgctggcctcaggaggcaggcagagtttaaaataaaactttctcatgatttcttgaacatctttccctgtttgtatatacactttgtgtttatttttcagtagctgcagtatattttttttcaatattcagtataatgcagtgtatttcatcatatgctgtatggagagtgggcagacttctgtggagggcccgatagtaaccatttgaagctttctggacctgtggtcttagtcccagcgattctgcagagcggccatcggcagcatgtcaaccatttgcatggctgggctccagggaaactactgacaacgacaggtggtgggccatagtttcctgacccctgtgctatgccagaatttctttttcctcttccctatgagtggacctaaatatgttaattccttttcacctttcaaaacggacagccccttgaacattaaaaacttcgcagaccctaca

SEQ ID NO: 8793 - protein, 129 aa, Homo sapiens; identical to SEQ ID NO: 1264

SEQ ID NO: 8794 - DNA, 3776 bp, Homo sapiens
ccaggtttctccactgtagtccccaacaccattccaggctgtactctttggaatcaagttactaggcatagcccataatcaaagtgggggtgggtggggcagaaatcgagctcccgctattggaagaaggggtatttagatatattatttagaattttcctgtgaggcgggtcctggggccagaatgaaacggtggaatgggggcggggattggcgagcaaagtgactcgacccggcaaacccagcctggcaggaaagcccgaggtctgggcgaacagggccgcgcgccctaggtggtttaacttcgtaaggaaagactccgcaggccggcttttcagtgcgcagcttgctcgcctgcgggttactgggttttctgacccctgactcgacgtaggggttatggggctgtgggtgtgccgacctcgtccccgactgtactgggcgttggcggcgagtccgcgaacactgcgcatgcgcgagccggaagctgccgcccgcggcggaaggggcggacccgggagactgaggacttggattgcttaaggacaccaggcaggcgcgacagccttcagcctctccctctgcagttttggccggttcctttaacttgccttcatctggggctgtttggtatttccacgtgccttgggcccgcccactgcagcctccatcttggaagcggccgccggcgcctagattgagcatttccacagaaattacagttttgtcctttttgaaaaaatagaactgtatttcagaaaaaagaaactacagttttagcatgcagaaaggaaaagggagaacaagccggatcagaagacgaaaactctgcggaagttctgaatcaagaggagagatggggtctttctgtgttgggcaggctgggctcaaactcctggcctcaagcagtcctcccgccttggcctcccaaatgctgggaatacagaatgaatgagagccacaagtctgaatttatagagctgaggaagtggctgaaagctaggaagtttcaagattcaaacttagcgcctgcttgttttccaggtacaggaagagggctgatgagtcaaacatccctgcaggagggacagatgattatttcgttgcctgagagttgcctgctcaccacggacacagtgattcgaagctacttaggggcatacattactaagtggaagcctcctccatctcctctgctggcgctgtgcacctttttagtttcagaaaagcatgctgggcaccgatctctttggaagccttacctggagattttacccaaggcgtatacctgccctgtttgtttggagccggaagtggtgaaccttcttcccaaatctttaaaagcaaaggctgaagagcagagagcccacgtgcaggagttctttgcttcctccagagactttttctcttctctgcagcctctgtttgcggaggctgttgacagcatcttcagctacagtgccctgctgtgggcttggtgcaccgtcaacaccagagccgtgtacctgaggcccaggcagcgggaatgcctttctgcagagccggacacctgtgcactcgctccgtacctggacctgctgaatcatagcccacatgtccaggtaaaagcagcgtttaatgaagaaactcattcttacgaaattagaacgacttcacgttggagaaagcatgaagaggtattcatctgttacggccctcacgataatcaacggctgttcctggaatacggatttgtttctgtccataatcctcatgcttgtgtttatgtctcaagagaaatacttgttaaatatcttccatcaacagataaacagatggacaaaaagatttctattttaaaggatcatggctatatagaaaatttgacatttggatgggatggaccatcttggaggctactcacagcccttaagttgttatgtctggaagctgagaaatttacatgctggaaaaaagtacttcttggggaggtaatttcagatacgaatgagaagacaagtttggacatagcccagaaaatatgctattatttcatagaagagactaatgctgtgcttcaaaaggtgtctcatatgaaggatgaaaaagaggccctgataaaccaactaactttggtggaatccttgtggacggaagagctaaagattctcagggcatctgccgagaccctgcacagtttgcaaacagcttttacctgatttcaccgaagcgcatttggtcacctcctctggtgggtgttagtcacacattttagactaaggtttgatggactaaatttatatagtttagagtcgatgagttgtgtctactcaacaattaggaacttaatccttttccttttgcttttcctacagaaacaaaagttaattttgaagagcatcatcatgggctggggtggtggctgcccccaggacatgcaggatttctgcagggggcagcacaggttctgggattgtgaggctgtgagtgaaggtggacaagctgtctggatggcaggtctaatgctcttccgaataaagtgctgaactgtgaggagagaggcggactgtgaggcagccaggagccagctgcgtccgtgtgtggtctgtcaccacggggcctgcttcttatctgacacagcagctatcagagtctagtggttgtgcttttaagatgctctgataccattgggttaaggggcagattggcggtgggtgtggggcagtgtgaggtagtcctggatccccgccagggtggcccagacgccagcccttccctgtgtggctgcactgaggtgggtgttgaagagccccctaggggacacacagcttccaggaggagggaatgtcctctaagcatgctcctggcctctcaaggtggcgcttgtctaattattcacttgggaagaatgactagctcagccagcggctctttctgctttgttctggcgactttcctgggcaggcctttccacctggggagctggctcatcctgcacagctgggccgtggtgggcctgtctgcttgattctggggttcagtgtaggtcagctgatggcgaaccatggtggtggtttggcttctgttcttattcttgagttttgataccacgcagaccttgggtggggagagcttcctgcacagctctcagcggcctgtggccttggaactgcctgcgtaagtaacggaggggctgctggtcctgttcaggcccgtgctggggacgccgcttagacaatgttgcccagagtcctgtttaccctcccagggttcattcttcccaagaactcaaattcctttctcattggagcctagtgaaaccaaatgaacgggacctgctggcctcaggaggcaggcagagtttaaaataaaactttctcatgatttcttgaacatctttccctgtttgtatatacactttgtgtttatttttcagtagctgcagtatattttttttcaatattcagtataatgcagtgtatttcatcatatgctgtatggagagtgggcagacttctgtggagggcccgatagtaaccatttgaagctttctggacctgtggtcttagtcccagcgattctgcagagcggccatcggcagcatgtcaaccatttgcatggctgggctccagggaaactactgacaacgacaggtggtgggccatagtttcctgacccctgtgctatgccagaatttctttttcctcttccctatgagtggacctaaatatgttaattccttttcacctttcaaaacggacagccccttgaacattaaaaacttcgcagaccctaca

SEQ ID NO: 8795 - protein, 416 aa, Homo sapiens; identical to SEQ ID NO: 1256

SEQ ID NO: 8796 - DNA, 3509 bp, Homo sapiens
ccaggtttctccactgtagtccccaacaccattccaggctgtactctttggaatcaagttactaggcatagcccataatcaaagtgggggtgggtggggcagaaatcgagctcccgctattggaagaaggggtatttagatatattatttagaattttcctgtgaggcgggtcctggggccagaatgaaacggtggaatgggggcggggattggcgagcaaagtgactcgacccggcaaacccagcctggcaggaaagcccgaggtctgggcgaacagggccgcgcgccctaggtggtttaacttcgtaaggaaagactccgcaggccggcttttcagtgcgcagcttgctcgcctgcgggttactgggttttctgacccctgactcgacgtaggggttatggggctgtgggtgtgccgacctcgtccccgactgtactgggcgttggcggcgagtccgcgaacactgcgcatgcgcgagccggaagctgccgcccgcggcggaaggggcggacccgggagactgaggacttggattgcttaaggacaccaggcaggcgcgacagccttcagcctctccctctgcagttttggccggttcctttaacttgccttcatctggggctgtttggtatttccacgtgccttgggcccgcccactgcagcctccatcttggaagcggccgccggcgcctagaactgtatttcagaaaaaagaaactacagttttagcatgcagaaaggaaaagggagaacaagccggatcagaagacgaaaactctgcggaagttctgaatcaagaggagtgaatgagagccacaagtctgaatttatagagctgaggaagtggctgaaagctaggaagtttcaagattcaaacttagcgcctgcttgttttccaggtacaggaagagggctgatgagtcaaacatccctgcaggagggacagatgattatttcgttgcctgagagttgcctgctcaccacggacacagtgattcgaagctacttaggggcatacattactaagtggaagcctcctccatctcctctgctggcgctgtgcacctttttagtttcagaaaagcatgctgggcaccgatctctttggaagccttacctggagattttacccaaggcgtatacctgccctgtttgtttggagccggaagtggtgaaccttcttcccaaatctttaaaagcaaaggctgaagagcagagagcccacgtgcaggagttctttgcttcctccagagactttttctcttctctgcagcctctgtttgcggaggctgttgacagcatcttcagctacagtgccctgctgtgggcttggtgcaccgtcaacaccagagccgtgtacctgaggcccaggcagcgggaatgcctttctgcagagccggacacctgtgcactcgctccgtacctggacctgctgaatcatagcccacatgtccaggtaaaagcagcgtttaatgaagaaactcattcttacgaaattagaacgacttcacgttggagaaagcatgaagaggtattcatctgttacggccctcacgataatcaacggctgttcctggaatacggatttgtttctgtccataatcctcatgcttgtgtttatgtctcaagagaaatacttgttaaatatcttccatcaacagataaacagatggacaaaaagatttctattttaaaggatcatggctatatagaaaatttgacatttggatgggatggaccatcttggaggctactcacagcccttaagttgttatgtctggaagctgagaaatttacatgctggaaaaaagtacttcttggggaggtaatttcagatacgaatgagaagacaagtttggacatagcccagaaaatatgctattatttcatagaagagactaatgctgtgcttcaaaaggtgtctcatatgaaggatgaaaaagaggccctgataaaccaactaactttggtggaatccttgtggacggaagagctaaagattctcagggcatctgccgagaccctgcacagtttgcaaacagcttttacctgatttcaccgaagcgcatttggtcacctcctctgaaacaaaagttaattttgaagagcatcatcatgggctggggtggtggctgcccccaggacatgcaggatttctgcagggggcagcacaggttctgggattgtgaggctgtgagtgaaggtggacaagctgtctggatggcaggtctaatgctcttccgaataaagtgctgaactgtgaggagagaggcggactgtgaggcagccaggagccagctgcgtccgtgtgtggtctgtcaccacggggcctgcttcttatctgacacagcagctatcagagtctagtggttgtgcttttaagatgctctgataccattgggttaaggggcagattggcggtgggtgtggggcagtgtgaggtagtcctggatccccgccagggtggcccagacgccagcccttccctgtgtggctgcactgaggtgggtgttgaagagccccctaggggacacacagcttccaggaggagggaatgtcctctaagcatgctcctggcctctcaaggtggcgcttgtctaattattcacttgggaagaatgactagctcagccagcggctctttctgctttgttctggcgactttcctgggcaggcctttccacctggggagctggctcatcctgcacagctgggccgtggtgggcctgtctgcttgattctggggttcagtgtaggtcagctgatggcgaaccatggtggtggtttggcttctgttcttattcttgagttttgataccacgcagaccttgggtggggagagcttcctgcacagctctcagcggcctgtggccttggaactgcctgcgtaagtaacggaggggctgctggtcctgttcaggcccgtgctggggacgccgcttagacaatgttgcccagagtcctgtttaccctcccagggttcattcttcccaagaactcaaattcctttctcattggagcctagtgaaaccaaatgaacgggacctgctggcctcaggaggcaggcagagtttaaaataaaactttctcatgatttcttgaacatctttccctgtttgtatatacactttgtgtttatttttcagtagctgcagtatattttttttcaatattcagtataatgcagtgtatttcatcatatgctgtatggagagtgggcagacttctgtggagggcccgatagtaaccatttgaagctttctggacctgtggtcttagtcccagcgattctgcagagcggccatcggcagcatgtcaaccatttgcatggctgggctccagggaaactactgacaacgacaggtggtgggccatagtttcctgacccctgtgctatgccagaatttctttttcctcttccctatgagtggacctaaatatgttaattccttttcacctttcaaaacggacagccccttgaacattaaaaacttcgcagaccctaca

SEQ ID NO: 8797 - protein, 440 aa, Homo sapiens; identical to SEQ ID NO: 1266

SEQ ID NO: 8798 - DNA, 1209 bp, Homo sapiens
gttgcccgggtaacgggagcagagtcggcgggattgagcatttccacagaaattacagttttgtcctttttgaaaaaatagaactgtatttcagaaaaaagaaactacagttttagcatgcagaaaggaaaagggagaacaagccggatcagaagacgaaaactctgcggaagttctgaatcaagaggagagatggggtctttctgtgttgggcaggctgggctcaaactcctggcctcaagcagtcctcccgccttggcctcccaaatgctgggaatacagaatgaatgagagccacaagtctgaatttatagagctgaggaagtggctgaaagctaggaagtttcaagattcaaacttagcgcctgcttgttttccaggtacaggaagagggctgatgagtcaaacatccctgcaggagggacagatgattatttcgttgcctgagagttgcctgctcaccacggacacagtgattcgaagctacttaggggcatacattactaagtggaagcctcctccatctcctctgctggcgctgtgcacctttttagtttcagaaaagcatgctgggcaccgatctctttggaagccttacctggagattttacccaaggcgtatacctgccctgtttgtttggagccggaagtggtgaaccttcttcccaaatctttaaaagcaaaggctgaagagcagagagcccacgtgcaggagttctttgcttcctccagagactttttctcttctctgcagcctctgtttgcggaggctgttgacagcatcttcagctacagtgccctgctgtgggcttggtgcaccgtcaacaccagagccgtgtacctgaggcccaggcagcgggaatgcctttctgcagagccggacacctgtgcactcgctccgtacctggacctgctgaatcatagcccacatgtccaggtaaaagcagcgtttaatgaagaaactcattcttacgaaattagaacgacttcacgttggagaaagcatgaagaggtattcatctgttacggccctcacgataatcaacggctgttcctggaatacggatttgtttctgtccataatcctcatgcttgtgtttatgtctcaagaggttggaatcaactttgttcttaacattaacactatataatttttttccccatttggagatgtgtattttcagttttaataaaaatatcaaaacctta

SEQ ID NO: 8799 - protein, 283 aa, Homo sapiens; identical to SEQ ID NO: 1260

SEQ ID NO: 8800 - DNA, 1213 bp, Homo sapiens
gacagagggcttcaggcacgcggctgctgctgccactgctgctctgagacaaggtggatgagtctgctgccggatcaagaaaaagaactgtatttcagaaaaaagaaactacagttttagcatgcagaaaggaaaagggagaacaagccggatcagaagacgaaaactctgcggaagttctgaatcaagaggagagatggggtctttctgtgttgggcaggctgggctcaaactcctggcctcaagcagtcctcccgccttggcctcccaaatgctgggaatacagaatgaatgagagccacaagtctgaatttatagagctgaggaagtggctgaaagctaggaagtttcaagattcaaacttagcgcctgcttgttttccaggtacaggaagagggctgatgagtcaaacatccctgcaggagggacagatgattatttcgttgcctgagagttgcctgctcaccacggacacagtgattcgaagctacttaggggcatacattactaagtggaagcctcctccatctcctctgctggcgctgtgcacctttttagtttcagaaaagcatgctgggcaccgatctctttggaagccttacctggagattttacccaaggcgtatacctgccctgtttgtttggagccggaagtggtgaaccttcttcccaaatctttaaaagcaaaggctgaagagcagagagcccacgtgcaggagttctttgcttcctccagagactttttctcttctctgcagcctctgtttgcggaggctgttgacagcatcttcagctacagtgccctgctgtgggcttggtgcaccgtcaacaccagagccgtgtacctgaggcccaggcagcgggaatgcctttctgcagagccggacacctgtgcactcgctccgtacctggacctgctgaatcatagcccacatgtccaggtaaaagcagcgtttaatgaagaaactcattcttacgaaattagaacgacttcacgttggagaaagcatgaagaggtattcatctgttacggccctcacgataatcaacggctgttcctggaatacggatttgtttctgtccataatcctcatgcttgtgtttatgtctcaagaggttggaatcaactttgttcttaacattaacactatataatttttttccccatttggagatgtgtattttcagttttaataaaaatatcaaaacctta

SEQ ID NO: 8801 - protein, 283 aa, Homo sapiens; identical to SEQ ID NO: 1260

SEQ ID NO: 8802 - DNA, 470 bp, Homo sapiens
ggaaataccaaacagccccagatgaaggcaagttaaaggaaccggccaaaactgcagagggagaggctgaaggctgtcgcgcctgcctggtgtccttaagcaatccaagtcctcagtctcccgggtccgccccttccgccgcgggcggcagcttccggctcgcgcatgcgcagtgttcgcggactcgccgccaacgcccagtacagtcggggacgagtccaagaggccctttgccaattccaactggaacatccaacatcggacactaatccagccaactgccataactacagctttgattagacaagagactgatttcaacaactttctcctgataagaagatcatggactatggaatggactggttctggtttacagaggctgtgtacttgcgtgccttgatgtcctgaaagaccttttgacagatagggcctaatggtaatacatttaaatgtcaagtcaccatccc

SEQ ID NO: 8803 - protein, 45 aa, Homo sapiens; identical to SEQ ID NO: 1484

SEQ ID NO: 8804 - DNA, 1061 bp, Homo sapiens
agcggccgggcgtgtaacccacgggtgcgcgcccacgaccgccagactcgagcagtctctggaacacgctgcggggctcccgggcctgagccaggtctgttctccacgcaggtgttccgcgcgccccgttcagccatgtcgtccggcatccatgtagcgctggtgactggaggcaacaagggcatcggcttggccatcgtgcgcgacctgtgccggctgttctcgggggacgtggtgctcacggcgcgggacgtgacgcggggccaggcggccgtacagcagctgcaggcggagggcctgagcccgcgcttccaccagctggacatcgacgatctgcagagcatccgcgccctgcgcgacttcctgcgcaaggagtacgggggcctggacgtgctggtcaacaacgcgggcatcgccttcaaggttgctgatcccacaccctttcatattcaagctgaagtgacgatgaaaacaaatttctttggtacccgagatgtgtgcacagaattactccctctaataaaaccccaagggagagtggtgaacgtatctagcatcatgagcgtcagagcccttaaaagctgcagcccagagctgcagcagaagttccgcagtgagaccatcactgaggaggagctggtggggctcatgaacaagtttgtggaggatacaaagaagggagtgcaccagaaggagggctggcccagcagcgcatacggggtgacgaagattggcgtcaccgttctgtccaggatccacgccaggaaactgagtgagcagaggaaaggggacaagatcctcctgaatgcctgctgcccagggtgggtgagaactgacatggcgggacccaaggccaccaagagcccagaagaaggtgcagagacccctgtgtacttggcccttttgcccccagatgctgagggtccccatggacaatttgtttcagagaagagagttgaacagtggtgagctgggctcacagctccatccatgggccccattttgtaccttgtcctgagttggtccaaagggcatttacaatgtcataaatatccttatat

SEQ ID NO: 8805 - protein, 277 aa, Homo sapiens; identical to SEQ ID NO: 1268

SEQ ID NO: 8806 - DNA, 1264 bp, Homo sapiens
agcggccgggcgtgtaacccacgggtgcgcgcccacgaccgccagactcgagcagtctctggaacacgctgcggggctcccgggcctgagccaggtctgttctccacgcaggtgttccgcgcgccccgttcagccatgtcgtccggcatccatgtagcgctggtgactggaggcaacaagggcatcggcttggccatcgtgcgcgacctgtgccggctgttctcgggggacgtggtgctcacggcgcgggacgtgacgcggggccaggcggccgtacagcagctgcaggcggagggcctgagcccgcgcttccaccagctggacatcgacgatctgcagagcatccgcgccctgcgcgacttcctgcgcaaggagtacgggggcctggacgtgctggtcaacaacgcgggcatcgccttcaaggttgctgatcccacaccctttcatattcaagctgaagtgacgatgaaaacaaatttctttggtacccgagatgtgtgcacagaattactccctctaataaaaccccaagggagagtggtgaacgtatctagcatcatgagcgtcagagcccttaaaagctgcagcccagagctgcagcagaagttccgcagtgagaccatcactgaggaggagctggtggggctcatgaacaagtttgtggaggatacaaagaagggagtgcaccagaaggagggctggcccagcagcgcatacggggtgacgaagattggcgtcaccgttctgtccaggatccacgccaggaaactgagtgagcagaggaaaggggacaagatcctcctgaatgcctgctgcccagggtgggtgagaactgacatggcgggacccaaggccaccaagagcccagaagaaggtgcagagacccctgtgtacttggcccttttgcccccagatgctgagggtccccatggacaatttgtttcagagaagagagttgaacagtggtgagctgggctcacagctccatccatgggccccattttgtaccttgtcctgagttggtccaaagggcatttacaatgtcataaatatccttatataagaaaaaaaatgatctcttatcaattagcactcactaatgtactactaattgagcaacctacgcactcagttgactacgtaaatctgtcaggtcttttgtgatttcctctgatgcaggagaggaaaaattgtaattgatgaaaataatgaatgaaaatcaacagatgaataaatggttctttataagtgtccatttgtacag

SEQ ID NO: 8807 - protein, 277 aa, Homo sapiens; identical to SEQ ID NO: 1268

SEQ ID NO: 8808 - DNA, 1536 bp, Homo sapiens
agcggccgggcgtgtaacccacgggtgcgcgcccacgaccgccagactcgagcagtctctggaacacgctgcggggctcccgggcctgagccaggtctgttctccacgcaggtgttccgcgcgccccgttcagccatgtcgtccggcatccatgtagcgctggtgactggaggcaacaagggcatcggcttggccatcgtgcgcgacctgtgccggctgttctcgggggacgtggtgctcacggcgcgggacgtgacgcggggccaggcggccgtacagcagctgcaggcggagggcctgagcccgcgcttccaccagctggacatcgacgatctgcagagcatccgcgccctgcgcgacttcctgcgcaaggagtacgggggcctggacgtgctggtcaacaacgcgggcatcgccttcaaggttgctgatcccacaccctttcatattcaagctgaagtgacgatgaaaacaaatttctttggtacccgagatgtgtgcacagaattactccctctaataaaaccccaagttgtgctacttctaaggctctggttcaccaggacctcaaagggcagctcttccaaatctcacctgactctactcagccaaaattcgaaggcaggaatgaacttcttcatgcaactaccaccacactttctatgcgtattcctcttagaactcataccagtaactgtctctcatatgaaaattttctgctccaaaatccctgcaaatttggcattcacctctctacgggattgttgcacacctttctacataatgctttgtggtgtatcttagggagagtggtgaacgtatctagcatcatgagcgtcagagcccttaaaagctgcagcccagagctgcagcagaagttccgcagtgagaccatcactgaggaggagctggtggggctcatgaacaagtttgtggaggatacaaagaagggagtgcaccagaaggagggctggcccagcagcgcatacggggtgacgaagattggcgtcaccgttctgtccaggatccacgccaggaaactgagtgagcagaggaaaggggacaagatcctcctgaatgcctgctgcccagggtgggtgagaactgacatggcgggacccaaggccaccaagagcccagaagaaggtgcagagacccctgtgtacttggcccttttgcccccagatgctgagggtccccatggacaatttgtttcagagaagagagttgaacagtggtgagctgggctcacagctccatccatgggccccattttgtaccttgtcctgagttggtccaaagggcatttacaatgtcataaatatccttatataagaaaaaaaatgatctcttatcaattagcactcactaatgtactactaattgagcaacctacgcactcagttgactacgtaaatctgtcaggtcttttgtgatttcctctgatgcaggagaggaaaaattgtaattgatgaaaataatgaatgaaaatcaacagatgaataaatggttctttataagtgtccatttgtacag

SEQ ID NO: 8809 - protein, 222 aa, Homo sapiens
MSSGIHVALVTGGNKGIGLAIVRDLCRLFSGDVVLTARDVTRGQAAVQQLQAEGLSPRFHQLDIDDLQSIRALRDFLRKEYGGLDVLVNNAGIAFKVADPTPFHIQAEVTMKTNFFGTRDVCTELLPLIKPQVVLLLRLWFTRTSKGSSSKSHLTLLSQNSKAGMNFFMQLPPHFLCVFLLELIPVTVSHMKIFCSKIPANLAFTSLRDCCTPFYIMLCGVS

SEQ ID NO: 8810 - DNA, 497 bp, Homo sapiens
ggcgtgtaacccacgggtgcgcgcccacgaccgccagactcgagcagtctctggaacacgctgcggggctcccgggcctgagccaggtctgttctccacgcaggtgttccgcgcgccccgttcagccatgtcgtccggcatccatgtagcgctggtgactggaggcaacaagggcatcggcttggccatcgtgcgcgacctgtgccggctgttctcgggggacgtggtgctcacggcgcgggacgtgacgcggggccaggcggccgtacagcagctgcaggcggagggcctgagcccgcgcttccaccagctggacatcgacgatctgcagagcatccgcgccctgcgcgacttcctgcgcaaggagtacgggggcctggacgtgctggtcaacaacgcgggcatcgccttcaaggttgctgatcccacaccctttcatattcaagctgaagtgacgatgaaaacaaatttctttggtacccgagatgtgtgcacag

SEQ ID NO: 8811 - protein, 122 aa, Homo sapiens
MSSGIHVALVTGGNKGIGLAIVRDLCRLFSGDVVLTARDVTRGQAAVQQLQAEGLSPRFHQLDIDDLQSIRALRDFLRKEYGGLDVLVNNAGIAFKVADPTPFHIQAEVTMKTNFFGTRDVC

SEQ ID NO: 8812 - DNA, 934 bp, Homo sapiens
agactcgagcagtctctggaacacgctgcggggctcccgggcctgagccaggtctgttctccacgcaggtgttccgcgcgccccgttcagccatttgctgatcccacaccctttcatattcaagctgaagtgacgatgaaaacaaatttctttggtacccgagatgtgtgcacagaattactccctctaataaaaccccaagggagagtggtgaacgtatctagcatcatgagcgtcagagcccttaaaagctgcagcccagagctgcagcagaagttccgcagtgagaccatcactgaggaggagctggtggggctcatgaacaagtttgtggaggatacaaagaagggagtgcaccagaaggagggctggcccagcagcgcatacggggtgacgaagattggcgtcaccgttctgtccaggatccacgccaggaaactgagtgagcagaggaaaggggacaagatcctcctgaatgcctgctgcccagggtgggtgagaactgacatggcgggacccaaggccaccaagagcccagaagaaggtgcagagacccctgtgtacttggcccttttgcccccagatgctgagggtccccatggacaatttgtttcagagaagagagttgaacagtggtgagctgggctcacagctccatccatgggccccattttgtaccttgtcctgagttggtccaaagggcatttacaatgtcataaatatccttatataagaaaaaaaatgatctcttatcaattagcactcactaatgtactactaattgagcaacctacgcactcagttgactacgtaaatctgtcaggtcttttgtgatttcctctgatgcaggagaggaaaaattgtaattgatgaaaataatgaatgaaaatcaacagatgaataaatggttctttataagtgtccatttgtacag

SEQ ID NO: 8813 - protein, 167 aa, Homo sapiens
MKTNFFGTRDVCTELLPLIKPQGRVVNVSSIMSVRALKSCSPELQQKFRSETITEEELVGLMNKFVEDTKKGVHQKEGWPSSAYGVTKIGVTVLSRIHARKLSEQRKGDKILLNACCPGWVRTDMAGPKATKSPEEGAETPVYLALLPPDAEGPHGQFVSEKRVEQW

SEQ ID NO: 8814 - DNA, 159 bp, Homo sapiens
ctctgagggtgaggggaggaggacatacgtggttccgtctttattgctaaggatttctttcttataccaggtgataggtacatggtgtctgtaagatgattattctttccgcatatctcccagactgatcgtgctggaggatgtcctcaaatctgttcc

SEQ ID NO: 8815 - protein, 30 aa, Homo sapiens
SEGEGRRTYVVPSLLLRISFLYQVIGTWCL

SEQ ID NO: 8816 - DNA, 604 bp, Homo sapiens
caatctccaacaagatcctgccatgcaacccaaaactcagaagcacaactgcagtaagccagtgccagtgaaggagtgaacctttagggggccaagggcctatgactcctgcagtgtggcacagcaagcagagtggacaaagccattcttctcttctggaacccacagtgaagagaacccaggaacctgatctgccagccaagaactaggaatttctcaccagccaggctctctgtggactccagctgggtggatggtaaaaatcactgtctcatctccaaggttctttttttgttttgtttttgtttttgtttttgttttagataggatctcacttcatcacccaggctggagtgcagtggcacaaacacagctcactgcagccccgacctccagggctcaagtgatccttccacctcagcacccccaagttgctgggactgcagacatgcaccaccatgcctaggtaacatttttagtattttttgtagagatggagttttgacatgttgccaagcctgatctcaaactcctgggctcaagtgattctcctgcctcagcctcccaaagtgctgggattgcaggtgtgaaccaccatgtccaa

SEQ ID NO: 8817 - protein, 70 aa, Homo sapiens
MVKITVSSPRFFFCFVFVFVFVLDRISLHHPGWSAVAQTQLTAAPTSRAQVILPPQHPQVAGTADMHHHA

SEQ ID NO: 8818 - DNA, 348 bp, Homo sapiens
ctcagaagcacaactgcagtaagccagtgccagtgaaggagagatgggtgttgctgtgttgcccaggcttgtcttcaactcctggcctcaaggaatctgccctcattggcctctcagtgtgcttggtattataggcatgtgccaccatgtccagactaaaacattttctaattacaaaaattgtatgcatcataaagctttaaacttgcttttcaagacaaaagaagaaattttgaagaaacaaaccgctacaaaagcaaaaataatggtaggaaacgtgtagattaagagatacagtgtatgcaccttatttagatcttaatgcaaataaaatgtattttaaaaatg

SEQ ID NO: 8819 - protein, 79 aa, Homo sapiens
MGVAVLPRLVFNSWPQGICPHWPLSVLGIIGMCHHVQTKTFSNYKNCMHHKALNLLFKTKEEILKKQTATKAKIMVGNV

SEQ ID NO: 8820 - DNA, 1564 bp, Homo sapiens
ggcggccgggctggagggccctgccaggggtggggctgggcccgcggtgtctcgtcccctcgcggagccgctcctgccgccgccgccgccgcctcctcattcatcctcgtgcaccataggcggcacaggcaccaagatgtccaaccgagtggtctgccgagaagccagtcacgccgggagctggtacacagcctcaggaccgcagctgaatgcacagctagaaggttggctttcacaagtacagtctacaaaaagacctgctagagccattattgccccccatgcaggatatacgtactgtgggtcttgtgctgcccatgcttataaacaagtggatccgtctattacccggagaattttcatccttgggccttctcatcatgtgcccctctctcgatgtgcactttccagtgtggatatatataggacacccctgtatgaccttcgtattgaccaaaagatttacggagaactatggaagacaggaatgtttgaacgcatgtctctgcagacagatgaagatgaacgcagtattgaaatgcatttgccttatacagctaaagccatggaaagccataaggatgagtttaccattattcctttactggttggagctctgagtcaaaagaacaggaattcggaacttttcagtaaatatctagcggatcctagtaatctctttgtggtttcttctgatttctgccattggggtcaaaggttccgtcacagttactatgatgaatcccagggggagatttgtagatccattgaacatctagataaaatgggtatgagtattatagaacaattagaccctgtatcttttagcaattacttgaagaaataccataatactatatgtggaagacatcccattggggtgttattaaatgctatcacagagctccagaagaatggaatgaatatgagtttttcgtttttgaattatgcccagtcgagccagtgtagaaactggcaagacagttcagtgagttatgcagctggagcactcacggtccactgaagctctgaatcctcagggatgccacctgcacattctcatactctgtccgggctcccagcctagcctttaccacgatactggtcctggtttggggggattctgaaacctcaaactaatagaactttcttctctttttttctagtaggtgtagtccttccttaatttcaactcattaaaaaatgctttatagtttagggcagtggaaggaaggctggcatcaaaatattttgatcaaaaaagatgacaatgtaaaggctcagttatggcagacagttttttgaaagtaacttgtaaagcatttaccatatcctaaatttgcactctttgcagacttgtgcacatatattccgctttcagaatagttttgcaaattgtacacaaacaaacaaaaaggtggaagctttttaataaagaaattgcatttataaatgatctgtattagaatataataaatctccagttatagtcaattactacccatgttgtacaacagataccttctattttagttgctaataaagggctacacaactcaaaata

SEQ ID NO: 8821 - protein, 295 aa, Homo sapiens
MSNRVVCREASHAGSWYTASGPQLNAQLEGWLSQVQSTKRPARAIIAPHAGYTYCGSCAAHAYKQVDPSITRRIFILGPSHHVPLSRCALSSVDIYRTPLYDLRIDQKIYGELWKTGMFERMSLQTDEDERSIEMHLPYTAKAMESHKDEFTIIPLLVGALSQKNRNSELFSKYLADPSNLFVVSSDFCHWGQRFRHSYYDESQGEICRSIEHLDKMGMSIIEQLDPVSFSNYLKKYHNTICGRHPIGVLLNAITELQKNGMNMSFSFLNYAQSSQCRNWQDSSVSYAAGALTVH

SEQ ID NO: 8822 - DNA, 2202 bp, Homo sapiens
ggggaggccagctgggaggggagggggccgtgggggcggctcggctgaaccagccccggctgggcagcagcggggacgccgggggccggggccagggctttccgggcttaggtgaggccgccgtgggccccatcttccggcggtcgccggagtttgtggtgattgttgctgccgccgccacccccccggctgccatctcctcctcctgggccgccgcctcctcctcttcctcctcctcctgggccgggctgatcccctccccgctgccgcctcctcctgggctgggcccgcggtgtctcgtcccctcgcggagccgctcctgccgccgccgccgccgcctcctcattcatcctcgtgcaccataggcggcacaggcaccaagatgtccaaccgagtggtctgccgagaagccagtcacgccgggagctggtacacagcctcaggaccgcagctgaatgcacagctagaaggttggctttcacaagtacagtctacaaaaagacctgctagagccattattgccccccatgcaggatatacgtactgtgggtcttgtgctgcccatgcttataaacaagtggatccgtctattacccggagaattttcatccttgggccttctcatcatgtgcccctctctcgatgtgcactttccagtgtggatatatataggacacccctgtatgaccttcgtattgaccaaaagatttacggagaactatggaagacaggaatgtttgaacgcatgtctctgcagacagatgaagatgaacgcagtattgaaatgcatttgccttatacagctaaagccatggaaagccataaggatgagtttaccattattcctttactggttggagctctgagtcaaaagaacaggaattcggaacttttcagtaaatatctagcggatcctagtaatctctttgtggtttcttctgatttctgccattggggtcaaaggttccgtcacagttactatgatgaatcccagggggagatttgtagatccattgaacatctagataaaatgggtatgagtattatagaacaattagaccctgtatcttttagcaattacttgaagaaataccataatactatatgtggaagacatcccattggggtgttattaaatgctatcacagagctccagaagaatggaatgaatatgagtttttcgtttttgaattatgcccagtcgagccagtgtagaaactggcaagacagttcagtgagttatgcagctggagcactcacggtccactgaagctctgaatcctcagggatgccacctgcacattctcatactctgtccgggctcccagcctagcctttaccacgatactggtcctggtttggggggattctgaaacctcaaactaatagaactttcttctctttttttctagtaggtgtagtccttccttaatttcaactcattaaaaaatgctttatagtttagggcagtggaaggaaggctggcatcaaaatattttgatcaaaaaagatgacaatgtaaaggctcagttatggcagacagttttttgaaagtaacttgtaaagcatttaccatatcctaaatttgcactctttgcagacttgtgcacatatattccgctttcagaatagttttgcaaattgtacacaaacaaacaaaaaggtggaagctttttaataaagaaattgcatttataaatgatctgtattagaatataataaatctccagttatagtcaattactacccatgttgtacaacagataccttctattttagttgctaataaagggctacacaactcaaaataaataaataaataaataatttaaaaaataaataaaaataaactgaatgaaattgaaaacatatcaatgtgagatgccactaaagtcatactaaaagggaatttacaccacttactgcctacattagaaaagaagtctcaaatcaatgcaaatcaatgacttctgcctttacagtaagaaaccagaaaaagagcaaataaaatccagtaagcagaagaaaggaaacaaagatcagaacagaaattaatataatcaggaaaagagagagagagagaatcattgtaaccagaagtttgaggaaaatcaaatcaattggtaaacctctagccagacagatcagaaaaaaacacgaaagacacaaaccagtctcagaaatgacaggtagcatcattac

SEQ ID NO: 8823 - protein, 295 aa, Homo sapiens; identical to SEQ ID NO: 8821

SEQ ID NO: 8824 - DNA, 1673 bp, Homo sapiens
ggggaggccagctgggaggggagggggccgtgggggcggctcggctgaaccagccccggctgggcagcagcggggacgccgggggccggggccagggctttccgggcttaggtgaggccgccgtgggccccatcttccggcggtcgccggagtttgtggtgattgttgctgccgccgccacccccccggctgccatctcctcctcctgggccgccgcctcctcctcttcctcctcctcctgggccgggctgatcccctccccgctgccgcctcctcctgggctgggcccgcggtgtctcgtcccctcgcggagccgctcctgccgccgccgccgccgcctcctcattcatcctcgtgcaccataggcggcacaggcaccaagatgtccaaccgagtggtctgccgagaagccagtcacgccgggagctggtacacagcctcaggaccgcagctgaatgcacagctagaaggttggctttcacaagtacagtctacaaaaagacctgctagagccattattgccccccatgcaggatatacgtactgtgggtcttgtgctgcccatgcttataaacaagtggatccgtctattacccggagaattttcatccttgggccttctcatcatgtgcccctctctcgatgtgcactttccagtgtggatatatataggacacccctgtatgaccttcgtattgaccaaaagatttacggagaactatggaagacaggaatgtttgaacgcatgtctctgcagacagatgaagatgaacgcagtattgaaatgcatttgccttatacagctaaagccatggaaaggtcaaaggttccgtcacagttactatgatgaatcccagggggagatttgtagatccattgaacatctagataaaatgggtatgagtattatagaacaattagaccctgtatcttttagcaattacttgaagaaataccataatactatatgtggaagacatcccattggggtgttattaaatgctatcacagagctccagaagaatggaatgaatatgagtttttcgtttttgaattatgcccagtcgagccagtgtagaaactggcaagacagttcagtgagttatgcagctggagcactcacggtccactgaagctctgaatcctcagggatgccacctgcacattctcatactctgtccgggctcccagcctagcctttaccacgatactggtcctggtttggggggattctgaaacctcaaactaatagaactttcttctctttttttctagtaggtgtagtccttccttaatttcaactcattaaaaaatgctttatagtttagggcagtggaaggaaggctggcatcaaaatattttgatcaaaaaagatgacaatgtaaaggctcagttatggcagacagttttttgaaagtaacttgtaaagcatttaccatatcctaaatttgcactctttgcagacttgtgcacatatattccgctttcagaatagttttgcaaattgtacacaaacaaacaaaaaggtggaagctttttaataaagaaattgcatttataaatgatctgtattagaatataataaatctccagttatagtcaattactacccatgttgtacaacagataccttctattttagttgctaataaagggctacacaactcaaaata

SEQ ID NO: 8825 - protein, 201 aa, Homo sapiens
MQDIRTVGLVLPMLINKWIRLLPGEFSSLGLLIMCPSLDVHFPVWIYIGHPCMTFVLTKRFTENYGRQECLNACLCRQMKMNAVLKCICLIQLKPWKGQRFRHSYYDESQGEICRSIEHLDKMGMSIIEQLDPVSFSNYLKKYHNTICGRHPIGVLLNAITELQKNGMNMSFSFLNYAQSSQCRNWQDSSVSYAAGALTVH

SEQ ID NO: 8826 - DNA, 1596 bp, Homo sapiens
ggggaggccagctgggaggggagggggccgtgggggcggctcggctgaaccagccccggctgggcagcagcggggacgccgggggccggggccagggctttccgggcttaggtgaggccgccgtgggccccatcttccggcggtcgccggagtttgtggtgattgttgctgccgccgccacccccccggctgccatctcctcctcctgggccgccgcctcctcctcttcctcctcctcctgggccgggctgatcccctccccgctgccgcctcctcctgggctgggcccgcggtgtctcgtcccctcgcggagccgctcctgccgccgccgccgccgcctcctcattcatcctcgtgcaccataggcggcacaggcaccaagatgtccaaccgagtggtctgccgagaagccagtcacgccgggagctggtacacagcctcaggaccgcagctgaatgcacagctagaaggttggctttcacaagtacagtctacaaaaagacctgctagagccattattgccccccatgcaggatatacgtactgtgggtcttgtgctgcccatgcttataaacaagtggatccgtctattacccggagaattttcatccttgggccttctcatcatgtgcccctctctcgatgtgcactttccagtgtggatatatataggacacccctgtatgaccttcgtattgaccaaaagatttacggagaactatggaagacaggaatgtttgaacgcatgtctctgcagacagatgaagatgaacgcagtattgaaatgcatttgccttatacagctaaagccatggaaagggtatgagtattatagaacaattagaccctgtatcttttagcaattacttgaagaaataccataatactatatgtggaagacatcccattggggtgttattaaatgctatcacagagctccagaagaatggaatgaatatgagtttttcgtttttgaattatgcccagtcgagccagtgtagaaactggcaagacagttcagtgagttatgcagctggagcactcacggtccactgaagctctgaatcctcagggatgccacctgcacattctcatactctgtccgggctcccagcctagcctttaccacgatactggtcctggtttggggggattctgaaacctcaaactaatagaactttcttctctttttttctagtaggtgtagtccttccttaatttcaactcattaaaaaatgctttatagtttagggcagtggaaggaaggctggcatcaaaatattttgatcaaaaaagatgacaatgtaaaggctcagttatggcagacagttttttgaaagtaacttgtaaagcatttaccatatcctaaatttgcactctttgcagacttgtgcacatatattccgctttcagaatagttttgcaaattgtacacaaacaaacaaaaaggtggaagctttttaataaagaaattgcatttataaatgatctgtattagaatataataaatctccagttatagtcaattactacccatgttgtacaacagataccttctattttagttgctaataaagggctacacaactcaaaata

SEQ ID NO: 8827 - protein, 147 aa, Homo sapiens
MSNRVVCREASHAGSWYTASGPQLNAQLEGWLSQVQSTKRPARAIIAPHAGYTYCGSCAAHAYKQVDPSITRRIFILGPSHHVPLSRCALSSVDIYRTPLYDLRIDQKIYGELWKTGMFERMSLQTDEDERSIEMHLPYTAKAMERV

SEQ ID NO: 8828 - DNA, 1733 bp, Homo sapiens
ggggaggccagctgggaggggagggggccgtgggggcggctcggctgaaccagccccggctgggcagcagcggggacgccgggggccggggccagggctttccgggcttaggtgaggccgccgtgggccccatcttccggcggtcgccggagtttgtggtgattgttgctgccgccgccacccccccggctgccatctcctcctcctgggccgccgcctcctcctcttcctcctcctcctgggccgggctgatcccctccccgctgccgcctcctcctgggctgggcccgcggtgtctcgtcccctcgcggagccgctcctgccgccgccgccgccgcctcctcattcatcctcgtgcaccataggcggcacaggcaccaagatgtccaaccgagtggtctgccgagaagccagtcacgccgggagctggtacacagcctcaggaccgcagctgaatgcacagctagaaggttggctttcacaagtacagtctacaaaaagacctgctagagccattattgccccccatgcaggatatacgtactgtgggtcttgtgctgcccatgcttataaacaagtggatccgtctattacccggagaattttcatccttgggccttctcatcatgtgcccctctctcgatgtgcactttccagtgtggatatatataggacacccctgtatgaccttcgtattgaccaaaagatttacggagaactatggaagacaggaatgtttgaacgcatgtctctgcagacagatgaagatgaacgcagtattgaaatgcatttgccttatacagctaaagccatggaaagccataaggatgagtttaccattattcctttactggttggagctctgagtcaaaagaacaggaattcggaacttttcagtaaatatctagcggatcctagtaatctctttgtggtttcttctgatttctgccattgggggtatgagtattatagaacaattagaccctgtatcttttagcaattacttgaagaaataccataatactatatgtggaagacatcccattggggtgttattaaatgctatcacagagctccagaagaatggaatgaatatgagtttttcgtttttgaattatgcccagtcgagccagtgtagaaactggcaagacagttcagtgagttatgcagctggagcactcacggtccactgaagctctgaatcctcagggatgccacctgcacattctcatactctgtccgggctcccagcctagcctttaccacgatactggtcctggtttggggggattctgaaacctcaaactaatagaactttcttctctttttttctagtaggtgtagtccttccttaatttcaactcattaaaaaatgctttatagtttagggcagtggaaggaaggctggcatcaaaatattttgatcaaaaaagatgacaatgtaaaggctcagttatggcagacagttttttgaaagtaacttgtaaagcatttaccatatcctaaatttgcactctttgcagacttgtgcacatatattccgctttcagaatagttttgcaaattgtacacaaacaaacaaaaaggtggaagctttttaataaagaaattgcatttataaatgatctgtattagaatataataaatctccagttatagtcaattactacccatgttgtacaacagataccttctattttagttgctaataaagggctacacaactcaaaata

SEQ ID NO: 8829 - protein, 204 aa, Homo sapiens
MSNRVVCREASHAGSWYTASGPQLNAQLEGWLSQVQSTKRPARAIIAPHAGYTYCGSCAAHAYKQVDPSITRRIFILGPSHHVPLSRCALSSVDIYRTPLYDLRIDQKIYGELWKTGMFERMSLQTDEDERSIEMHLPYTAKAMESHKDEFTIIPLLVGALSQKNRNSELFSKYLADPSNLFVVSSDFCHWGYEYYRTIRPCIF

SEQ ID NO: 8830 - DNA, 1716 bp, Homo sapiens
ggccgtgggggcggctcggctgaaccagccccggctgggcagcagcggggacgccgggggccggggccagggctttccgggcttaggtgaggccgccgtgggccccatcttccggcggtcgccggagtttgtggtgattgttgctgccgccgccacccccccggctgccatctcctcctcctgggccgccgcctcctcctcttcctcctcctcctgggccgggctgatcccctccccgctgccgcctcctcctgggctgggcccgcggtgtctcgtcccctcgcggagccgctcctgccgccgccgccgccgcctcctcattcatcctcgtgcaccataggcggcacaggcaccaagatgtccaaccgagtggtctgccgagaagccagtcacgccgggagctggtacacagcctcaggaccgcagctgaatgcacagctagaaggttggctttcacaagtacagtctacaaaaagacctgctagagccattattgccccccggagaattttcatccttgggccttctcatcatgtgcccctctctcgatgtgcactttccagtgtggatatatataggacacccctgtatgaccttcgtattgaccaaaagatttacggagaactatggaagacaggaatgtttgaacgcatgtctctgcagacagatgaagatgaacgcagtattgaaatgcatttgccttatacagctaaagccatggaaagccataaggatgagtttaccattattcctttactggttggagctctgagtcaaaagaacaggaattcggaacttttcagtaaatatctagcggatcctagtaatctctttgtggtttcttctgatttctgccattggggtcaaaggttccgtcacagttactatgatgaatcccagggggagatttgtagatccattgaacatctagataaaatgggtatgagtattatagaacaattagaccctgtatcttttagcaattacttgaagaaataccataatactatatgtggaagacatcccattggggtgttattaaatgctatcacagagctccagaagaatggaatgaatatgagtttttcgtttttgaattatgcccagtcgagccagtgtagaaactggcaagacagttcagtgagttatgcagctggagcactcacggtccactgaagctctgaatcctcagggatgccacctgcacattctcatactctgtccgggctcccagcctagcctttaccacgatactggtcctggtttggggggattctgaaacctcaaactaatagaactttcttctctttttttctagtaggtgtagtccttccttaatttcaactcattaaaaaatgctttatagtttagggcagtggaaggaaggctggcatcaaaatattttgatcaaaaaagatgacaatgtaaaggctcagttatggcagacagttttttgaaagtaacttgtaaagcatttaccatatcctaaatttgcactctttgcagacttgtgcacatatattccgctttcagaatagttttgcaaattgtacacaaacaaacaaaaaggtggaagctttttaataaagaaattgcatttataaatgatctgtattagaatataataaatctccagttatagtcaattactacccatgttgtacaacagataccttctattttagttgctaataaagggctacacaactcaaaata

SEQ ID NO: 8831 - protein, 272 aa, Homo sapiens
MSNRVVCREASHAGSWYTASGPQLNAQLEGWLSQVQSTKRPARAIIAPRRIFILGPSHHVPLSRCALSSVDIYRTPLYDLRIDQKIYGELWKTGMFERMSLQTDEDERSIEMHLPYTAKAMESHKDEFTIIPLLVGALSQKNRNSELFSKYLADPSNLFVVSSDFCHWGQRFRHSYYDESQGEICRSIEHLDKMGMSIIEQLDPVSFSNYLKKYHNTICGRHPIGVLLNAITELQKNGMNMSFSFLNYAQSSQCRNWQDSSVSYAAGALTVH

SEQ ID NO: 8832 - DNA, 882 bp, Homo sapiens
cctgggcagcacgcattcaccagaatcctgtcagctttcctcttctcatccagacgcctggccaggatcctcgataagaccgtgacccccaacttggacaccccataagggtcttctctgtcgcccaggctggagtgcagtgctgcagtcgtggctcactgtagcgtcagtctcctgagctcaggaaaactagacaatccaccagcccaggaggggacaagcaggcttattcctcctcctcgtcatctctggctccagccccaccctggcccttgctggcattcttcctcttcacgtggctggggttggccaccccaatagggaagcagagggagaagtcaatgtgcttctgggaatccaggcggacagtgaagaacaggatatttaccacctgctcacggacacggatatgacactgttgaatcagcacatgagcgtggcggatggacttagccaagccaagcttgaagacctgggtctgtaggaatctctaagaaatcattgatcttcaggcccaggatgtaatccagcttcatcttgccctcatccagcaccccagtgcggaccagccactgcagcagggcaatgccttcgaacagacgccgtgggtccttctcatcaagcgtcagcagctcccgggcggccttatggatcttgaccagggtaaatttgaccctccagacctcacatttgttctggagcccatactcaccaatcagctttagcttttggtcgagatgaggtttctcgaagggtctctgcagggtcacataagtttggcaacaaacccagctctgggccgctggcatgttggctccacttgcccgtctatgcctaagcacaggccctggtcactgagaaagagctcaaattttttatata

SEQ ID NO: 8833 - protein, 51 aa, Homo sapiens
MPSNRRRGSFSSSVSSSRAALWILTRVNLTLQTSHLFWSPYSPISFSFWSR

SEQ ID NO: 8834 - DNA, 825 bp, Homo sapiens
agccgcggtgtgagggagcgggagtcttccttagcttctccgccatgggtgtcgcttcgtagccgggctgctccgggaaaggcctcgtacagcacgcattcaccagaatcctgtcagctttcctcttctcatccagacgcctggccaggatcctcgataagaccgtgacccccaacttggacaccccataaggaaaactagacaatccaccagcccaggaggggacaagcaggcttattcctcctcctcgtcatctctggctccagccccaccctggcccttgctggcattcttcctcttcacgtggctggggttggccaccccaatagggaagcagagggagaagtcaatgtgcttctgggaatccaggcggacagtgaagaacaggatatttaccacctgctcacggacacggatatgacactgttgaatcagcacatgagcgtggcggatggacttagccaagccaagcttgaagacctgggtctgtaggaatctctaagaaatcattgatcttcaggcccaggatgtaatccagcttcatcttgccctcatccagcaccccagtgcggaccagccactgcagcagggcaatgccttcgaacagacgccgtgggtccttctcatcaagcgtcagcagctcccgggcggccttatggatcttgaccagggtaaatttgaccctccagacctcacatttgttctggagcccatactcaccaatcagctttagcttttggtcgagatgaggtttctcgaagggtctctgcagggtcacataagtttggcaacaaacccagctctgggccgctggcatgttggctc

SEQ ID NO: 8835 - protein, 51 aa, Homo sapiens; identical to SEQ ID NO: 8833

SEQ ID NO: 8836 - DNA, 746 bp, Homo sapiens
ctgcggctggccacctccgcaccctcggagcgctccagggggccccaacccaagccctgcacctactcttgaaggcgacggccgcgttgttgaccagtacgttgagccccccgtactccttgcgcaggaagtcgcgcagggcgcggatgctctgcaagtcgtcgatgtccagttggtggaagcgcgggctcaggccctccgcctgcagctgctgcacggccgcctggccccgcgccacgtcccgcgcggaaaactagacaatccaccagcccaggaggggacaagcaggcttattcctcctcctcgtcatctctggctccagccccaccctggcccttgctggcattcttcctcttcacgtggctggggttggccaccccaatagggaagcagagggagaagtcaatgtgcttctgggaatccaggcggacagtgaagaacaggatatttaccacctgctcacggacacggatatgacactgttgaatcagcacatgagcgtggcggatggacttagccaagccaagcttgaagacctgggtctgtaggaatctctaagaaatcattgatcttcaggcccaggatgtaatccagcttcatcttgccctcatccagcaccccagtgcggaccagccactgcagcagggcaatgccttcgaacagacgccgtgggtccttctcatcaagcgtcagcagctcccgggcggccttatggatcttgaccagggtaaatttgaccctccaga

SEQ ID NO: 8837 - protein, 36 aa, Homo sapiens
MLCKSSMSSWWKRGLRPSACSCCTAAWPRATSRAEN

SEQ ID NO: 8838 - DNA, 810 bp, Homo sapiens
accgtctctactaaaattacaaaaattagccaggcatgatggcagatgcctggtaatcccagctactcaggaggctgaggcaggagaacagcttgaacccaggtggcagaggttgcagtgagctgagatcatgccactgcactccagcctgggcaacaagagcgagactccgtctcaaaaaaaaaaagaacagaaataatcaaaccacagcatcaattcattcattcattccaccaacatttattaagcagcaagctccgaagcagacgtttaccagttttgcacaactttgtcatggaccaactggccttgtggctcagtggcatctggaggcaagagggccaagtagacaggggtctcagccccctcctccacagtcctgatgctgtctttcccatccatgtctgtcttcactggtcctgggcagcacgcattcaccagaatcctgtcagctttcctcttctcatccagacgcctggccaggatcctcgataagaccgtgacccccaacttggacaccccataaggttcccagatgatgtgacagctactggtctccagccacaccttgagaacacttggctttgactaccacttcttaaacttaaaggaaaactagacaatccaccagcccaggaggggacaagcaggcttattcctcctcctcgtcatctctggctccagccccaccctggcccttgctggcattcttcctcttcacgtggctggggttggccaccccaatagggaagcagagggagaagtcaatgtgcttctgggaatccaggcggacagtgaagaacaggatat

SEQ ID NO: 8839 - protein, 66 aa, Homo sapiens
MDQLALWLSGIWRQEGQVDRGLSPLLHSPDAVFPIHVCLHWSWAARIHQNPVSFPLLIQTPGQDPR

SEQ ID NO: 8840 - DNA, 1114 bp, Homo sapiens
gcgtgggcagggggcgggcccgggagttggaacagagggcacagacggcccctcctcggaggggagggaccggagccggggcctttttctttaagactcgcagcactggatcccagaacttagtctgcgcggcggcattgacactagctgggctcctcggggcgcgccccaggtggtccgaagcccggtccgccctccacgcaggtgccccgcgctccccgctcagccatgtcgtcctgcagccgcgtggcgctggtgaccggggccaacaggggcatcggcttggccatcgcgcgcgaactgtgccgacagttctctggggatgtggtgctcaccgcgcgggacgtggcgcggggccaggcggccgtgcagcagctgcaggcggagggcctgagcccgcgcttccaccaactggacatcgacgacttgcagagcatccgcgccctgcgcgacttcctgcgcaaggagtacggggggctcaacgtactggtcaacaacgcggccgtcgccttcaagagtgatgatccaatgccctttgacattaaagctgagatgacactgaagacaaatttttttgccactagaaacatgtgcaacgagttactgccgataatgaaacctcatgggagagtggtgaatatcagtagtttgcagtgtttaagggcttttgaaaactgcagtgaagatctgcaggaaaggttccacagtgagacactcacagaaggagacctggtggatctcatgaaaaagtttgtggaggacacaaaaaatgaggtgcatgagagggaaggctggcccaactcaccttatggggtgtccaagttgggggtcacggtcttatcgaggatcctggccaggcgtctggatgagaagaggaaagctgacaggattctggtgaatgcgtgctgcccaggaccagtgaagacagacatggatgggaaagacagcatcaggactgtggaggagggggctgagacccctgtctacttggccctcttgcctccagatgccactgagccacaaggccagttggtccatgacaaagttgtgcaaaactggtaaacgtctgcttcggagcttgctgcttaataaatgttggtggaatgaatgaatg

SEQ ID NO: 8841 - protein, 277 aa, Homo sapiens; identical to SEQ ID NO: 1270

SEQ ID NO: 8842 - DNA, 1154 bp, Homo sapiens
gcgtgggcagggggcgggcccgggagttggaacagagggcacagacggcccctcctcggaggggagggaccggagccggggcctttttctttaagactcgcagcactggatcccagaacttagtctgcgcggcggcattgacactagctgggctcctcggggcgcgccccaggtggtccgaagcccggtccgccctccacgcaggtgccccgcgctccccgctcagccatgtcgtcctgcagccgcgtggcgctggtgaccggggccaacaggggcatcggcttggccatcgcgcgcgaactgtgccgacagttctctggggatgtggtgctcaccgcgcgggacgtggcgcggggccaggcggccgtgcagcagctgcaggcggagggcctgagcccgcgcttccaccaactggacatcgacgacttgcagagcatccgcgccctgcgcgacttcctgcgcaaggagtacggggggctcaacgtactggtcaacaacgcggccgtcgccttcaagagtgatgatccaatgccctttgacattaaagctgagatgacactgaagacaaatttttttgccactagaaacatgtgcaacgagttactgccgataatgaaacctcatgggagagtggtgaatatcagtagtttgcagtgtttaagggcttttgaaaactgcagtgaagatctgcaggaaaggttccacagtgagacactcacagaaggagacctggtggatctcatgaaaaagtttgtggaggacacaaaaaatgaggtgcatgagagggaaggctggcccaactcaccttatggggtgtccaagttgggggtcacggtcttatcgaggatcctggccaggcgtctggatgagaagaggaaagctgacaggattctggtgaatgcgtgctgcccaggaccagtgaagacagacatggatgggaaagacagcatcaggactgtggaggagggggctgagacccctgtctacttggccctcttgcctccagatgccactgagccacaaggccagttggtccatgacaaagttgtgcaaaactggtaaacgtctgcttcggagcttgctgcttaataaatgttggtggaatgaatgaatgaattgatgctgtggtttgattatttctgttcttttttttt

SEQ ID NO: 8843 - protein, 277 aa, Homo sapiens; identical to SEQ ID NO: 1270

SEQ ID NO: 8844 - DNA, 741 bp, Homo sapiens
ccgcggtgtgagggagcgggagtcttccttagcttctccgccatgggtgtcgcttcgtagccgggctgctccgggaaaggcctcgtacagcacgcattcaccagaatcctgtcagctttcctcttctcatccagacgcctggccaggatcctcgataagaccgtgacccccaacttggacaccccataagctttgttctcagaaacttggcggctacaaggaattaaatgtgaatgggaaaggaagaaagaaaaacacagatcatagaagctgtgccttcgaggaaataaatcctcttaaggggaggaggtgtcctctttgatctgagggcacacctctgggagagaggccagaggctgacagtcagcctcgtcagccagatgcgtcatcagccctgggaagggctgcacccacaccaccctccactgaggtccaggtggccccaccggtcccgaaacacctgctgccttactctagaaagagtaggcaagttgcgccctctagtggcttagtagttgcttgtcctattgactcagaaccttgaacaaataagcaagtcaaatacagatagatggtccctgccctctgatggttccacttaggacttactgacttcactgatggatgaggaagcgatatgcattctgcagaatctgtacttggaggccccatacaaccattctgcatttcactttcagtacagattcaataaattacataagatactcaacattttatgat

SEQ ID NO: 8845 - protein, 43 aa, Homo sapiens
MRHQPWEGLHPHHPPLRSRWPHRSRNTCCLTLERVGKLRPLVA

SEQ ID NO: 8846 - DNA, 4887 bp, Homo sapiens
agggtatcaccatgttacccaggctgttctcaaactcatgagcgcaagccatccacctgccttgatctcccaaagtgctgggattgtgctggcaggagccaccacacctggcttaaatgctcctcttgatggttggcctctttctctggcaatggctggctccctctgctcctcaggcacagggggtgagatgcacagtaacaactctgatccaatccagctggttctttttagaggaaaaacctatagctggagcagtcaacagaggcaaggtcaccttgtggcagctgcagctgcaaacatgggaaggaagcagggggcaggggagggcaggagatcatattttggaagagggtgctgggcagaccatccaataagggctaatggcagcccttctctaagaatgagaaatgtcattctgaccagcagttgacagttaagggtcatccaaatgagctacatgcttatcctaaaaggattggctagagacaaaagaggaagtgggttacacacttatccaaaaaggattggttagagacaaaagaggaagaagaaataaaagggactggctcatttcttctgaacttcctgtctgtaactttgtcaggcagagcctgaagtgctctgtggttcctgggctattgcccggcattagcaggactggagtttggctgcagagggaggcgagagtacaaaagatactcgggaagctgattgaaagccattaaattgtttttagagccaggaaaggagacattaaaatgtcttaggagctgtagcctgagatgaataccataagagcatgttggatttaatcagtgacatacaaataggctaaaggaagtttttgttgttgttttaggcttttttttgagacagggtcttgtcctgtcactcaggctgaagtgcagtggcgcaatcatggctcactgcagccttgacctcccaggttgaagtgatcctcccaacctcagcctctgagtagctgggactacaggtgtgcacctcgtctgcctgatctttttgaatttttgtagagaggggtctcgctatgttgtccaggctggtctcaaacttctgggctcaagcaacccgcctgccttggcctcccaaaatgctgggattataggcatgagccactccatctggcctcaagatgttaaatgcagtctaggtgggattcagacttccccctaccccaagtggatgaaaaagtgggtgcaggctgtgagagttaaactgacactttgaggtgctgccattgtaaatcagagagttaagaaaaacaaatagctacatactgtgatgaaccagaaataaccaggtcatcctgtgcagttcagttcccccaaataaaagaaacttgagcattcccatactttactgattccctaaggaaaaacggcattatctcttatgactgcagtgcttacctatgtcaggggatatgatgtgacatttgtgggtttgataatcaagtgacaacatttctaatttcacacagtgagcagcctatcataaacttggtaaccttggcaaatttgtagttatttccctttggtttttttccatctttcaatggattcgttttctttttaagtagagacagggtctggctgtgtcacccagaatgctgcagtgcagtggcacgaccatagctcactgcagccttgaactcctgggttcaactgatccttccaccttagcctaccaagtagctaggactacaggtgtgtgccaccatgtctggctaagttttgtttgatttgtttgcagacatggaggcctgctgtgttgcccaggctggtttcaaacacctgacctcaggtgatcctcctgcctcagcctcccaaagtgctgggatcagagacttgagccactgtggccagccggaatgtaaattccactgaatttttttgtgtgattagccttcttgccgaagccttgacactcttgcaagcctttgcgagtacatttcttctatttcagaagactccttgctctccaagacttttttctacaaggtgtaaccagaagccaggaggcctgttgcaaaaccaatcccatttgaaagcagagaatgtgaactcacctattgtcataatgattataaaagaggctttggctcactcctgtaatcccagcactttgcaaggccaaggcaggcagatcacctgaggtcaggagttcaagaccagcctggcctacatggcgaaaccccatctccactaaaaatacaaaaattagccaggcatggtggtgcacgcctgtaatcccagccactctactcaggaggctgaggcaggagaattgcttgaacctgggaggtggaggctgcagtgagccaagacggcaccactgcactccagccaggcgaccgagcaagactctgtctgaaaaaaaaaaaaaaattatgaaagagggtgggtgcggtggctcatgtctggaatcccagcgttttgagaggcaaaggagcgaggatcactttagttcaggagtgctagaccaacctgggaaacatagtgagaccctgtctctaccaaaaattaaattatttgggcatgatggcacatgcctgtagtcccagctacttaggaggctgaggtgggaggatcacttgaggttttagtcatggaagtctcttgccctggaggtcgaggctgcagtaacccatgatcgtgccactgcactctagcctgggcaacaaagcaagacactgtctcaaattaaaaaaaaaaaaaaaggcttagggagttactgaagaatcaccctgggctgtagttcacagggagtgtgcataggttaaggagaagacatctgcatgagtttcagtaaagagatacagttgcggtggctgggcaacctcgtaaacattctgggaaggaatgcagaatgcaaaacccagctgaaaaatctagaagaaatcatgtcccagttaaagaagatattcctcctgagtccttcaagctctgctactttaatgagatgcaaagaaagcttgcagagctaaggaaatagaggataaagcatcacccttacagaatcaaaaaactggaaacagcaaggaacagctagaaaatggctccatagttctgaaaccacttgctacaccagtggttctaagtgcagtcccagcaccagcagtgtcagcaccacctgagaacttgttagaaatgaagtgaattggtgtggggagtggaaccggcaatctggcttaatcagccctccaggtggtcccgatgcccactaaaatttgagactatgttcttctccctctcaggctgaagagttgggcatagcaatgttgttcagctccagattccagaactagacacgtttctcccagggagattcttatgaacattccttttcaagaacagaaagaggccaggcgtggtggctcatgcctgtaatcccagcactttgggaggctgaggcgggtggatcacctgaggtcaggagttcgagaccagcctgaccaacatagagaaaccccatctctactaaaaatacaaaattagccaggtgtggtggcacatgcctgtaatcccagctgctcaggaggctgaggcaggagaatcattcaaacctgggaggcggaggttgcggtgagccaagatcatgccattgcactccagcctgggcaacaagagcgaaactccatctcaaaaaaaaaaaaaagagagagagagagagaaaagaaagagaaaaaaaggccgggtgcagtggctcatgcctgaaatcccagaactttgggaggccaagttgggcagatcacctgaggtcaggagttcgagaccagcctggccaacatggtgaaataccgtctctactaaaattacaaaaattagccaggcatgatggcagatgcctggtaatcccagctactcaggaggctgaggcaggagaacagcttgaacccaggtggcagaggttgcagtgagctgagatcatgccactgcactccagcctgggcaacaagagcgagactccgtctcaaaaaaaaaaagaacagaaataatcaaaccacagcatcaattcattcattcattccaccaacatttattaagcagcaagctccgaagcagacgtttaccagttttgcacaactttgtcatggaccaactggccttgtggctcagtggcatctggaggcaagagggccaagtagacaggggtctcagccccctcctccacagtcctgatgctgtctttcccatccatgtctgtcttcactggtcctgggcagcacgcattcaccagaatcctgtcagctttcctcttctcatccagacgcctggccaggatcctcgataagaccgtgacccccaacttggacaccccataagctttgttctcagaaacttggcggctacaaggaattaaatgtgaatgggaaaggaagaaagaaaaacacagatcatagaagctgtgccttcgaggaaataaatcctcttaaggggaggaggtgtcctctttgatctgagggcacacctctgggagagaggccagaggctgacagtcagcctcgtcagccagatgcgtcatcagccctgggaagggctgcacccacaccaccctccactgaggtccaggtggccccaccggtcccgaaacacctgctgccttactctagaaagagtaggcaagttgcgccctctagtggcttagtagttgcttgtcctattgactcagaaccttgaacaaataagcaagtcaaatacagatagatggtccctgccctctgatggttccacttaggacttactgacttcactgatggatgaggaagcgatatgcattctgcagaatctgtacttggaggccccatacaaccattctgcatttcactttcagtacagattcaataaattacataagatactc

SEQ ID NO: 8847 - protein, 62 aa, Homo sapiens
MSFSKEIQLRWLGNLVNILGRNAECKTQLKNLEEIMSQLKKIFLLSPSSSATLMRCKESLQS

SEQ ID NO: 8848 - DNA, 4340 bp, Homo sapiens
gcccccgcctcgcgccgcgcgcacgtgactgcgcccccggccccgcccccggcctgccccccgcccccactggccgctcggccgcgcgcgggtcggccggctctatggggaaagcggcggctccgagccgaggcggcggctgtggcggccgctcccgcgggctctcgtcgctgttcacggttgtcccctgcctgtcgtgccacacggcggcgccgggcatgagcgcttccacgtccggctccgggccggagcccaagccccagccccagcccgtgcccgaaccggagcggggaccgctgtcagaacaggtgtcggaggcagtttcggaggcagtgccaagatcggaacctgtgtccgagacgacgtctgagccggagccaggggctgggcagccatcggaactgctgcaggggtcgcggccggggtcagagtcaagctcaggtgtaggggctgggcccttcactaaggccgcatcggagccgctctcccgggcggtggggagcgcgacctttctcagacccgagtcaggatcgctgccagcgttaaagcccctgcctcttctgcgaccaggacaggcgaagactcctcttggggttccaatgtcggggactggcacgacctccagtgccccactggccttactgcctctggacagcttcgagggctggcttctcaagtggaccaactatctgaagggctaccagcgccgctggttcgtgctgggcaatggtttgctctcttactacagaaatcagggtgaaatggcccacacgtgccgtggaaccatcaacctgtccaccgcgcacattgacacggaggactcttgtggtatcttgctgaccagtggggccaggagctaccacctcaaggccagctcagaggtggaccggcagcagtggatcaccgccctggagctggccaaggccaaggctgtccgcgtgatgaacactcattcagatgactctggggacgacgacgaggctaccaccccagccgacaagagcgagctgcaccacaccctgaagaatctttccctgaagttagatgacctcagcacgtgcaatgacctcatcgccaagcacggcgctgcactccagcgctccctgacagagctggacggcctcaagatcccatctgagagtggggagaagctgaaggtggtgaatgagcgggccaccctcttccgcatcacatccaatgctatgatcaacgcctgcagggacttcttggaactagcagagatacacagtcggaaatggcagcgggcactgcagtatgagcaggagcagcgcgtgcacttggaggaaaccattgagcagctggcgaagcagcacaacagcctcgagcgggccttccacagtgcccctggccggccggccaacccctccaagagcttcattgagggaagcctcttgactcccaaaggagaggacagtgaggaagatgaagataccgagtactttgatgccatggaagactccacatccttcatcaccgtgatcaccgaggccaaggaagacagcagaaaagctgaaggtagcaccgggacaagttccgtggactggagctcagcagacaatgtactagatggtgcctcgctcgtgcccaagggttcatccaaagtcaagaggcgagtccgcattcccaacaagcccaactacagccttaacctctggagcatcatgaagaactgcatcggccgggagctctccaggatccccatgccggtgaacttcaatgagcccctgtccatgctccagcggctgacagaggacctggagtaccaccacctgctggacaaggcagtgcactgcaccagctcagtggagcagatgtgcctggtggccgccttctctgtgtcctcctactccaccacagtgcaccgcatcgccaagcccttcaaccccatgctgggggagaccttcgagctggaccgcctcgacgacatgggcctgcgctccctctgtgagcaggtgagccaccaccccccctcagctgcgcactacgtgttctccaagcatggctggagcctctggcaggagatcaccatctccagcaagttccggggaaaatacatctccatcatgccgctaggtgccatccacttagaattccaggccagtgggaatcactacgtgtggaggaagagcacctcaactgttcacaacatcatcgtgggcaagctctggatcgaccagtcaggggacatcgagattgtgaaccataagaccaatgaccggtgccagctgaagttcctgccctacagctacttctccaaagaggcagcccggaaggtgacaggagtggtgagtgacagccagggcaaggcccattacgtgctgtccggctcgtgggatgaacaaatggagtgctccaaggtcatgcatagcagtcccagcagccccagctctgacgggaagcagaagacagtgtaccagaccctgtcagccaagctgctgtggaagaagtacccgctgccggagaacgcggagaacatgtactacttctcagagctggccctgaccctcaacgagcacgaggagggcgtagcgccaaccgacagccgcctgcggcccgaccagcggctgatggagaagggccgttgggacgaggccaataccgagaagcagcggctggaggagaagcagcgcctgtcgcggcgccggcggctggaggcctgcgggccgggcagcagctgcagctcggaggaagagaaggaggcggatgcctacacgccactgtggtttgagaagaggctggatccgctgaccggggagatggcctgtgtgtacaagggcggctactgggaggccaaggagaagcaagactggcatatgtgccccaacatcttctgagcgccacccttgcaacaaatacaggcgcctgcacagcctggcccacctgttcattaatgcactcaatttagtactgaatggtctttctcccagcccattcccagcccttcctatttcctttcctattttttttttctccccacactttcttgggactcccaccttggaaggaggaagggctgacctgggttctctccagcccccaggtgcgccgggtcacccgtgccccttcattatggacctgggccctaccggaacccctgccccagttaccacaactcaggccggctggcccgggccatgggctgcgcaaatcaccagcccccaacccagggaggaactggcccctcctagggagcctcttcgacttttttagaaaaatgatctccatttctttccagccatgatgtttagtaaatatttttagtaccgcacttagcagacagctttccaagtgtgctttcttgccacaaaagtgtcctggcaagagccccttatttttaagacatcaggaagccagaccgctttgagttgggagaattttgtagctcaacatatcaagtcctcgatggtatctgagctgcccacacccccacctgccaaggccccacagagcccaaaacagaagggggctgccccagcccagcagagcacagagtttctggagctcccatccacagatgcaggagggggtactgatggtaacccccatgtggatttgagggcagcagtccctggcctcaccctagccagcctgggtggctccctagccccaagaggccaggaagggctggaaggcagggcctgcaggtgctccccgccctgagacccaggccccaaatcagcaataatgaacaaacccttggcccagcctgggctggtgacctgggcaccagagaccttgcatccctcctcatcctaggaggcccctaggggtgccccatctcagtgtcccctgaactctttatttgcctaatttatatatatatatatgagatatataaatatatataaaatagctattttgcttaaatttctacagtatgtaaaagtgaaaaaatgatgaagacgggtgcacctgtctgagtttggccctcatgtgagctgtgcccttccctctcctcatgcccccttccagcggcttctgccaaccatggggggctggaccaccatggccactgacccagcccctcagaatcccacactccaatcctttccatttcagtttagtcctaaaagttcatcacagggtctttctttctactccaggactggttttgtttttatatatataaaaaaaaaaagtgaaaacaccaatgtgtgaaatgccttacaatgcccactggagaggcggggcggggtggggcaggatggccccactggggctcctacagagctgtggaatgtacctctccccaacactgttttgttagcgagcaccttttgaccagtaataaaaaaccttggctttggagttttccactg

SEQ ID NO: 8849 - protein, 916 aa, Homo sapiens; identical to SEQ ID NO: 1272

SEQ ID NO: 8850 - DNA, 2051 bp, Homo sapiens
actggccgctcggccgcgcgcgggtcggccggctctatggggaaagcggcggctccgagccgaggcggcggctgtggcggccgctcccgcgggctctcgtcgctgttcacggttgtcccctgcctgtcgtgccacacggcggcgccgggcatgagcgcttccacgtccggctccgggccggagcccaagccccagccccagcccgtgcccgaaccggagcggggaccgctgtcagaacaggtgtcggaggcagtttcggaggcagtgccaagatcggaacctgtgtccgagacgacgtctgagccggagccaggggctgggcagccatcggaactgctgcaggggtcgcggccggggtcagagtcaagctcaggtgtaggggctgggcccttcactaaggccgcatcggagccgctctcccgggcggtggggagcgcgacctttctcagacccgagtcaggatcgctgccagcgttaaagcccctgcctcttctgcgaccaggacaggcgaagactcctcttggggttccaatgtcggggactggcacgacctccagtgccccactggccttactgcctctggacagcttcgagggctggcttctcaagtggaccaactatctgaagggctaccagcgccgctggttcgtgctgggcaatggtttgctctcttactacagaaatcagggtgaaatggcccacacgtgccgtggaaccatcaacctgtccaccgcgcacattgacacggaggactcttgtggtatcttgctgaccagtggggccaggagctaccacctcaaggccagctcagaggtggaccggcagcagtggatcaccgccctggagctggccaaggccaaggctgtccgcgtgatgaacactcattcagatgactctggggacgacgacgaggctaccaccccagccgacaagagcgagctgcaccacaccctgaagaatctttccctgaagttagatgacctcagcacgtgcaatgacctcatcgccaagcacggcgctgcactccagcgctccctgacagagctggacggcctcaagatcccatctgagagtggggagaagctgaaggtggtgaatgagcgggccaccctcttccgcatcacatccaatgctatgatcaacaagccactgccggaggcttcccaggcactgcctccctacccgagaccaaaactgctttgtcttgaataagcagttttggcttttccgagataatgagcgtctcagctggctgccgtcttgcacagtcttttatcagacatcagaggctcatctgtgtttacgaagccatcagaacagctccaagtttaagtgcctaatgaattgttttatgagaagcacaaccccctggggttggtcacgattcctttctgcagctccaggcccctcctgggaagccagggacttggatatggaagccacgcaccgcagtccccagaaggtagaaatcatcacccccaatctcttccgatctcacagtgagagggagctgcttctcccactgtgggggccccactgcaactccatcccactccccagccccatcctgactgtgatgtgtgcggggatgctcctagcatcccctagcgcccgtgcctgcattagggaaatctctactgccactggctcctcggacagggcagaccctcttcctcgtgaaatgctgtgtgttttccactttgtgggctctgattgagccggatcgtagaagtggagcctaaaatgagggatggctggccagacaaagcccacatggagggtgtccttcacagcgcgctggggcaggcagctctcttcctacagggacaggctggctgctccatcttcacttttccccaagaccacaaagaatctggggttgttccggcttcaggagaaaagtcagggtggttgggtgtggtggctcacacctgtaatcccaacactctgggaggctgaggtgggtggatcacttgaggccaggagttcaagaccagcatggccaacatggtgaaaccctgtctctactaaaaatacaaaaattagctggg

SEQ ID NO: 8851 - protein, 391 aa, Homo sapiens
MGKAAAPSRGGGCGGRSRGLSSLFTVVPCLSCHTAAPGMSASTSGSGPEPKPQPQPVPEPERGPLSEQVSEAVSEAVPRSEPVSETTSEPEPGAGQPSELLQGSRPGSESSSGVGAGPFTKAASEPLSRAVGSATFLRPESGSLPALKPLPLLRPGQAKTPLGVPMSGTGTTSSAPLALLPLDSFEGWLLKWTNYLKGYQRRWFVLGNGLLSYYRNQGEMAHTCRGTINLSTAHIDTEDSCGILLTSGARSYHLKASSEVDRQQWITALELAKAKAVRVMNTHSDDSGDDDEATTPADKSELHHTLKNLSLKLDDLSTCNDLIAKHGAALQRSLTELDGLKIPSESGEKLKVVNERATLFRITSNAMINKPLPEASQALPPYPRPKLLCLE

SEQ ID NO: 8852 - DNA, 3523 bp, Homo sapiens
agagcaactagagcaggcagtagagtggggtgggcggggatgaggagggggttgggtggctggtggccctagaggctggccctaaagaatacctggacagcctgccaccctattgctccaaaatgaaaatcctctaacagatgactctggggacgacgacgaggctaccaccccagccgacaagagcgagctgcaccacaccctgaagaatctttccctgaagttagatgacctcagcacgtgcaatgacctcatcgccaagcacggcgctgcactccagcgctccctgacagagctggacggcctcaagatcccatctgagagtggggagaagctgaaggtggtgaatgagcgggccaccctcttccgcatcacatccaatgctatgatcaacgcctgcagggacttcttggaactagcagagatacacagtcggaaatggcagcgggcactgcagtatgagcaggagcagcgcgtgcacttggaggaaaccattgagcagctggcgaagcagcacaacagcctcgagcgggccttccacagtgcccctggccggccggccaacccctccaagagcttcattgagggaagcctcttgactcccaaaggagaggacagtgaggaagatgaagataccgagtactttgatgccatggaagactccacatccttcatcaccgtgatcaccgaggccaaggaagacagcagaaaagctgaaggtagcaccgggacaagttccgtggactggagctcagcagacaatgtactagatggtgcctcgctcgtgcccaagggttcatccaaagtcaagaggcgagtccgcattcccaacaagcccaactacagccttaacctctggagcatcatgaagaactgcatcggccgggagctctccaggatccccatgccggtgaacttcaatgagcccctgtccatgctccagcggctgacagaggacctggagtaccaccacctgctggacaaggcagtgcactgcaccagctcagtggagcagatgtgcctggtggccgccttctctgtgtcctcctactccaccacagtgcaccgcatcgccaagcccttcaaccccatgctgggggagaccttcgagctggaccgcctcgacgacatgggcctgcgctccctctgtgagcaggtgagccaccaccccccctcagctgcgcactacgtgttctccaagcatggctggagcctctggcaggagatcaccatctccagcaagttccggggaaaatacatctccatcatgccgctaggtgccatccacttagaattccaggccagtgggaatcactacgtgtggaggaagagcacctcaactgttcacaacatcatcgtgggcaagctctggatcgaccagtcaggggacatcgagattgtgaaccataagaccaatgaccggtgccagctgaagttcctgccctacagctacttctccaaagaggcagcccggaaggtgacaggagtggtgagtgacagccagggcaaggcccattacgtgctgtccggctcgtgggatgaacaaatggagtgctccaaggtcatgcatagcagtcccagcagccccagctctgacgggaagcagaagacagtgtaccagaccctgtcagccaagctgctgtggaagaagtacccgctgccggagaacgcggagaacatgtactacttctcagagctggccctgaccctcaacgagcacgaggagggcgtagcgccaaccgacagccgcctgcggcccgaccagcggctgatggagaagggccgttgggacgaggccaataccgagaagcagcggctggaggagaagcagcgcctgtcgcggcgccggcggctggaggcctgcgggccgggcagcagctgcagctcggaggaagagaaggaggcggatgcctacacgccactgtggtttgagaagaggctggatccgctgaccggggagatggcctgtgtgtacaagggcggctactgggaggccaaggagaagcaagactggcatatgtgccccaacatcttctgagcgccacccttgcaacaaatacaggcgcctgcacagcctggcccacctgttcattaatgcactcaatttagtactgaatggtctttctcccagcccattcccagcccttcctatttcctttcctattttttttttctccccacactttcttgggactcccaccttggaaggaggaagggctgacctgggttctctccagcccccaggtgcgccgggtcacccgtgccccttcattatggacctgggccctaccggaacccctgccccagttaccacaactcaggccggctggcccgggccatgggctgcgcaaatcaccagcccccaacccagggaggaactggcccctcctagggagcctcttcgacttttttagaaaaatgatctccatttctttccagccatgatgtttagtaaatatttttagtaccgcacttagcagacagctttccaagtgtgctttcttgccacaaaagtgtcctggcaagagccccttatttttaagacatcaggaagccagaccgctttgagttgggagaattttgtagctcaacatatcaagtcctcgatggtatctgagctgcccacacccccacctgccaaggccccacagagcccaaaacagaagggggctgccccagcccagcagagcacagagtttctggagctcccatccacagatgcaggagggggtactgatggtaacccccatgtggatttgagggcagcagtccctggcctcaccctagccagcctgggtggctccctagccccaagaggccaggaagggctggaaggcagggcctgcaggtgctccccgccctgagacccaggccccaaatcagcaataatgaacaaacccttggcccagcctgggctggtgacctgggcaccagagaccttgcatccctcctcatcctaggaggcccctaggggtgccccatctcagtgtcccctgaactctttatttgcctaatttatatatatatatatgagatatataaatatatataaaatagctattttgcttaaatttctacagtatgtaaaagtgaaaaaatgatgaagacgggtgcacctgtctgagtttggccctcatgtgagctgtgcccttccctctcctcatgcccccttccagcggcttctgccaaccatggggggctggaccaccatggccactgacccagcccctcagaatcccacactccaatcctttccatttcagtttagtcctaaaagttcatcacagggtctttctttctactccaggactggttttgtttttatatatataaaaaaaaaaagtgaaaacaccaatgtgtgaaatgccttacaatgcccactggagaggcggggcggggtggggcaggatggccccactggggctcctacagagctgtggaatgtacctctccccaacactgttttgttagcgagcaccttttgaccagtaataaaaaaccttggctttggagttttccactg

SEQ ID NO: 8853 - protein, 550 aa, Homo sapiens
MINACRDFLELAEIHSRKWQRALQYEQEQRVHLEETIEQLAKQHNSLERAFHSAPGRPANPSKSFIEGSLLTPKGEDSEEDEDTEYFDAMEDSTSFITVITEAKEDSRKAEGSTGTSSVDWSSADNVLDGASLVPKGSSKVKRRVRIPNKPNYSLNLWSIMKNCIGRELSRIPMPVNFNEPLSMLQRLTEDLEYHHLLDKAVHCTSSVEQMCLVAAFSVSSYSTTVHRIAKPFNPMLGETFELDRLDDMGLRSLCEQVSHHPPSAAHYVFSKHGWSLWQEITISSKFRGKYISIMPLGAIHLEFQASGNHYVWRKSTSTVHNIIVGKLWIDQSGDIEIVNHKTNDRCQLKFLPYSYFSKEAARKVTGVVSDSQGKAHYVLSGSWDEQMECSKVMHSSPSSPSSDGKQKTVYQTLSAKLLWKKYPLPENAENMYYFSELALTLNEHEEGVAPTDSRLRPDQRLMEKGRWDEANTEKQRLEEKQRLSRRRRLEACGPGSSCSSEEEKEADAYTPLWFEKRLDPLTGEMACVYKGGYWEAKEKQDWHMCPNIF

SEQ ID NO: 8854 - DNA, 964 bp, Homo sapiens
gttccggggaaaatacatctccatcatgccgctaggtgccatccacttagaattccaggccagtgggaatcactacgtgtggaggaagagcacctcaactgttcacaacatcatcgtgggcaagctctggatcgaccagtcaggggacatcgagattgtgaaccataagaccaatgaccggtgccagctgaagttcctgccctacagctacttctccaaagaggcagcccggaaggtaagcaggaccagccacctctaagcaccccagggggcccagggcagagtctgcacctacgctggtcctgccaatgtccacaggtgacaggagtggtgagtgacagccagggcaaggcccattacgtgctgtccggctcgtgggatgaacaaatggagtgctccaaggtcatgcatagcagtcccagcagccccagctctgacgggaagcagaagacagtgtaccagaccctgtcagccaagctgctgtggaagaagtacccgctgccgtgagtagggctggcaggggccccgccacaggcaaaggagagggaaggaggacagtggacagaaagcaactgacaggcacaggaggtcgggagggttcagtccacacatgggcagagaacagtattatgcagccgacatcccagtgtgaaggcagacaccgaacagtaaataaatgtgaaactatcaaacactatgcacagactttaagcgaggtgataggacagagcccctccctgttcctccctacaagaaataaaaaacatacttgaaaataaccacaggaaatagaaaactataaaatgtggcataggaaagtccaaagagaacaaatagaaattcgacaaagggaaaaaaaaatgactgacattgagaaccctgtggaatggtttagtagctagaatctatcacctgaacacaggtcagaagaagtgacagaactgcatttaaagagacaaaaccc

SEQ ID NO: 8855 - protein, 77 aa, Homo sapiens
MPLGAIHLEFQASGNHYVWRKSTSTVHNIIVGKLWIDQSGDIEIVNHKTNDRCQLKFLPYSYFSKEAARKVSRTSHL

SEQ ID NO: 8856 - DNA, 395 bp, Homo sapiens
agaggcagcccggaaggtgacaggagtggtgagtgacagccagggcaaggcccattacgtgctgtccggctcgtgggatgaacaaatggagtgctccaaggtcatgcatagcagtcccagcagccccagctctgacgggaagcagaagacagtgtaccagaccctgtcagccaagctgctgtggaagaagtacccgctgccgtgagtagggctggcaggggccccgccacaggcaaaggagagggaaggaggacagtggacagaaagcaactgacaggcacaggaggtcgggagggttcagtccacacatgggcagagaacagtattatgcagccgacatcccagtgtgaaggcagacaccgaacagtaaataaatgtgaaactatcaaacacta

SEQ ID NO: 8857 - protein, 43 aa, Homo sapiens
MNKWSAPRSCIAVPAAPALTGSRRQCTRPCQPSCCGRSTRCRE

SEQ ID NO: 8858 - DNA, 542 bp, Homo sapiens
acgcctgtaatcccagcgctttgggaggctgaggccggtggatcacgaggtcaggagctggtattgaacccctgacctcaattggtctgcctatcttggccttccagagtgttgggattacaggcatcagctactgtgcccagcccatatggggatttttctagtcatttttttctagtataattgccttggagtcagacaatatacttggcataatttcagtcctttgaaatttgctttatggcccagtatatgggcagtttttgcacacgttccatgtgattgaagagaacagttgttgagtgcaaggttgtataactgtccagcaggccttgttcatactttctctacttgggttgtagttagtccatctttcctaatgtgtgtatatatatatatatattttaattatgtaagcatttcttttgttgaaaagatccttcaaaaaataccatatccatagatttactttctgtcatatagctgaatgtgttgtgtttggaattccattcttacatttaaaaatcaactggattgcccag

SEQ ID NO: 8859 - protein, 43 aa, Homo sapiens [sequence omitted]

SEQ ID NO: 8860 - DNA, 967 bp, Homo sapiens
ctttccaagtgtgctttcttgccacaaaagtgtcctggcaagagccccttatttttaagacatcaggaagccagaccgctttgagttgggagaattttgtagctcaacatatcaagtcctcgatggtatctgagctgcccacacccccacctgccaaggccccacagagcccaaaacagaagggggctgccccagcccagcagagcacagagtttctggagctcccatccacagatgcaggagggggtactgatggtaacccccatgtggatttgagggcagcagtccctggcctcaccctagccagcctgggtggctccctagccccaagaggccaggaagggctggaaggcagggcctgcaggtgctccccgccctagaccttgcatccctcctcatcctaggaggcccctaggggtgccccatctcagtgtcccctgaactctttatttgcctaatttatatatatatatatgagatatataaatatatataaaatagctattttgcttaaatttctacagtatgtaaaagtgaaaaaatgatgaagacgggtgcacctgtctgagtttggccctcatgtgagctgtgcccttccctctcctcatgcccccttccagcggcttctgccaaccatggggggctggaccaccatggccactgacccagcccctcagaatcccacactccaatcctttccatttcagtttagtcctaaaagttcatcacagggtctttctttctactccaggactggttttgtttttatatatataaaaaaaaaaagtgaaaacaccaatgtgtgaaatgccttacaatgcccactggagaggcggggcggggtggggcaggatggccccactggggctcctacagagctgtggaatgtacctctccccaacactgttttgttagcgagcaccttttgaccagtaataaaaaaccttggctttggagttttccactg

SEQ ID NO: 8861 - protein, 85 aa, Homo sapiens [sequence omitted]

SEQ ID NO: 8862 - DNA, 2122 bp, Homo sapiens
acgcaggcgtcttgtcgcttccgcctcgagcgtgtggcgggattgcggaagccctccacagttcataaccgttggctggttatgaaccgttcataacgggcgttaataaccataccctgttagactaagcatggtccacccgcgaatcctctacagagatggccaagcgctggggtcgtggctgcgtcctctaggccagccttgtgcaaaggaccttctcaccacagatcagccagaccatcttcctccttccaagtcatcaaagagttccaagctggtcacctgtcccttgatgttcccaggaaaccaggaaagaggacccctgcattttatcttcccatccagagtggcaggatctctgcctgggaaacaggcttcattcagcacagctgtggtagcattaacaaagcaaagtgggcacatgtagaagttgaagctaaaacattcaagaactccagtctgtttctgtggatgttaagggggtgaagataaaacaatggaggtgatgaggaggaataacttgaagacagtttaaagccacagtgatacaaagaatgaagagaaggaaggtgctggattttactaagaaaacagactgagttcaggagtctcaccagtagaactttatagtattgcgtttcgattacatgtgtgtgaattttaaaaactgattaccctccagtaaaaatgtggaaccaatttgcatttggattaaaacattaggtttggggacaaaagtggaccccatgctgcctgagatgaagagagagagcaggatggcagaggaatcaccagctcaagaaaccccaagacttggacagtcttccagcagaagaggccagggtctctcagtgtactactccaaacaggcctctcctagagatgtagtctgggaaggtccaaaacccaccagacaggcacatccagtggggaaaagacttcccattccagtgtggcctgcatccctcacctctgcttcccagtcttctgctgacctcagaggagcagggtggccattgctgatctgggttagggagatgccagaaacacacccaggtttgaaccacaggttagtggtacaaagtcacagtccttgtgccttcagaaaacccagaggccccaaatacgagtgggaagagagttgggaaaaactgaaccagactcttccaatggccattaaagagaaaattcagcaacgcttgcctttgtctttgaccctgagaagttaagggacacagattgtggcgccgtgatggaacatggagggaaggcatggtgtgcttcctgcagagatgcctctggagtccctgtggccacgggatctcactggccccctcttcaggcaccttgatggggctcagtggggccaggccgaagggtggaagtagaaaagcatcaacaggctgtccagatcaattggcaccatccaaggccctgctgcacccacacatggaggtcaccagctcagccccaggggttctttcacacacaagctccttccctaaggagtcctgtggggttccacactcagtgtgctgcccaagtcagagatttaccacagatctgtctccccctcaacctggactcaagttactgtggtgagaaacctcactgtccatggttaactgaagaaatccctccttcagaaagaacttgagtagtagatgaggtggttagacaggatctttttccctcaagctgtttggacgccacagccaggaccaactctgacagctgcgagagagagagcccctccaatgtggaacctcctacacagccccccttttgggtccctggatatgagcccccagcaggaccaccactctagggggaagtctccctcccatccctcagatccccacattgttcctcctgtaggagaaaagtcagccctgcccctggagcttctccaagatggcactggactcgccgttatcttgaggagccaggagctgaaatggctccggcttagcaacccagtatggccaaagtggaaaggttctctgtcctttgcagtcaccaaaaaaaaaaaaaaaaaaaaaaaaaaaaaaaaaaaagtatggtctcacaggcacagcatcttcttttaaaaaataaatatttataaacttaaggaagattc

SEQ ID NO: 8863 - protein, 98 aa, Homo sapiens
MVHPRILYRDGQALGSWLRPLGQPCAKDLLTTDQPDHLPPSKSSKSSKLVTCPLMFPGNQERGPLHFIFPSRVAGSLPGKQASFSTAVVALTKQSGHM

SEQ ID NO: 8864 - DNA, 2261 bp, Homo sapiens
gggattgcggaagccctccacagttcataaccgttggctggttatgaaccgttcataacgggcgttaataaccataccctgttagactaagcatggtccacccgcgaatcctctacagagatggccaagcgctggggtcgtggctgcgtcctctaggccaggccttggtgggcagctgttgacatgtccagaaccccaggaagtgctgaaggtacctgcagttcaggccccatggaagcccagacctccttcacccttcggggacactgaaattggccaaatgtttaggccatgaggatggctgctgagtaagcccataatccctacatcggacacaaccttgtgcaaaggaccttctcaccacagatcagccagaccatcttcctccttccaagtcatcaaagagttccaagctggtcacctgtcccttgatgttcccaggaaaccaggaaagaggacccctgcattttatcttcccatccagagtggcaggatctctgcctgggaaacaggcttcattcagcacagctgtggtagcattaacaaagcaaagtgggcacatgtagaagttgaagctaaaacattcaagaactccagtctgtttctgtggatgttaagggggtgaagataaaacaatggaggtgatgaggaggaataacttgaagacagtttaaagccacagtgatacaaagaatgaagagaaggaaggtgctggattttactaagaaaacagactgagttcaggagtctcaccagtagaactttatagtattgcgtttcgattacatgtgtgtgaattttaaaaactgattaccctccagtaaaaatgtggaaccaatttgcatttggattaaaacattaggtttggggacaaaagtggaccccatgctgcctgagatgaagagagagagcaggatggcagaggaatcaccagctcaagaaaccccaagacttggacagtcttccagcagaagaggccagggtctctcagtgtactactccaaacaggcctctcctagagatgtagtctgggaaggtccaaaacccaccagacaggcacatccagtggggaaaagacttcccattccagtgtggcctgcatccctcacctctgcttcccagtcttctgctgacctcagaggagcagggtggccattgctgatctgggttagggagatgccagaaacacacccaggtttgaaccacaggttagtggtacaaagtcacagtccttgtgccttcagaaaacccagaggccccaaatacgagtgggaagagagttgggaaaaactgaaccagactcttccaatggccattaaagagaaaattcagcaacgcttgcctttgtctttgaccctgagaagttaagggacacagattgtggcgccgtgatggaacatggagggaaggcatggtgtgcttcctgcagagatgcctctggagtccctgtggccacgggatctcactggccccctcttcaggcaccttgatggggctcagtggggccaggccgaagggtggaagtagaaaagcatcaacaggctgtccagatcaattggcaccatccaaggccctgctgcacccacacatggaggtcaccagctcagccccaggggttctttcacacacaagctccttccctaaggagtcctgtggggttccacactcagtgtgctgcccaagtcagagatttaccacagatctgtctccccctcaacctggactcaagttactgtggtgagaaacctcactgtccatggttaactgaagaaatccctccttcagaaagaacttgagtagtagatgaggtggttagacaggatctttttccctcaagctgtttggacgccacagccaggaccaactctgacagctgcgagagagagagcccctccaatgtggaacctcctacacagccccccttttgggtccctggatatgagcccccagcaggaccaccactctagggggaagtctccctcccatccctcagatccccacattgttcctcctgtaggagaaaagtcagccctgcccctggagcttctccaagatggcactggactcgccgttatcttgaggagccaggagctgaaatggctccggcttagcaacccagtatggccaaagtggaaaggttctctgtcctttgcagtcaccaaaaaaaaaaaaaaaaaaaaaaaaaaaaaaaaaaaagtatggtctcacaggcacagcatcttcttttaaaaaataaatatttataaacttaaggaagattc

SEQ ID NO: 8865 - protein, 160 aa, Homo sapiens; identical to SEQ ID NO: 1274

SEQ ID NO: 8866 - DNA, 431 bp, Homo sapiens
ggtcgtggctgcgtcctctaggccagtctcgctctgtcacccaggctggagtccagtggcacaatttcagcttactacaacctctgcctttccccgggttcaagcgattttcatgcctcggcctcccaagtagctgggattacagagagcacctgcagcctaaacaaggacaaaagttgaagcatggatctttctgtgcagcagctgtgatttctgcaccttctagctccctcgccgagcaccactccctcatatcttgctggcagagcaaggcagcatcgtgagcagagcaagtcctaagaagtacatgggttcaaatctggtctctgtcactgaccaacagactctttacctttctgagccttagtttcttcaactcctgcttcatttcacattttaaaaagtagaataaagacaaactccatgttttt

SEQ ID NO: 8867 - protein, 93 aa, Homo sapiens
SWLRPLGQSRSVTQAGVQWHNFSLLQPLPFPGFKRFSCLGLPSSWDYREHLQPKQGQKLKHGSFCAAAVISAPSSSLAEHHSLISCWQSKAAS

SEQ ID NO: 8868 - DNA, 706 bp, Homo sapiens
gtggtgcggtggaaggtgaagtttgactacgtgcccacagacacgacaccaagccatagctgtcgcagagccctccacttccgaatgcctccgcattgagcctgacaccactgccctgagcaccaatcacgagaccatcgacctgcttgtccagatcctccggaattgtttacggtacttcctgcctccaagtttccccatctccaagaagcagctgagtgctatgaattcagatgagctaatatcttttcctctgaaggagtacttcaagcaatatgaagtagggctccaaaacctgtgcaattcctaccagagccgtgctgactcccgggccaaggcctccgaggaaagcctgcgcacctccgagaggaagctccgcgagacggaggagaagctgcagaagctgaggaccaacatcgtggcactcctgcaaaaggtgcaggaggacatagacatcaacacagatgatgagctggacgcctacattgaggacctcatcaccaagggggactgaaggcaggagagagagcagctcccctgcccacctgcccctcaaccctgtagctgcagggggaggggacttcattcatgggttggtggtcgcaccttggtttgacttacacgggacatttgtgtttttggaggaaaagataccctgattctttgaatcttccttaagtttataaatatttattttttaaaagaa

SEQ ID NO: 8869 - protein, 96 aa, Homo sapiens [sequence omitted]

SEQ ID NO: 8870 - DNA, 4824 bp, Homo sapiens
tgggccaagtgtgaggtaatctgaccaccaccctgaactgggtttggtccggctttgaaaaaagaaatcgtgagtgcctaggagctttttcacttgggaggtggtgaagctgcaacttgcgccatataacactccgtcgacatcttggtctccggtcttgggcctgtttaagaatcctggcatcacgtgtggcgaagacatggctgatcagttttctgacagaagtgggtaaatttccgcgttggtaaatttcctgacaggaaatttcggggaaccaaaaaaggctggaagaacatgaagatggagcagtcataaaccacccactcaaggaccatctccttcaggaccatccacacgagactcagattgtctgaattgagctatcgcaacttaatgctaaaagctccttaaagctacagatttatgacatagttccttccaaaatattacatcataaatcattgagaagattaaaaaaaaacacttgaagaaattgtagttttaaacatctctgcatatattttggatagctactaggttactttaactgtcattaaggagcacagacttactgaagctttactggacagaatcctgggaaatcgatatcattataaggttatatttcccagttagcgggtgaagggctggagaccttattgcagtcatggctttcacaaattacagcagtctgaatcgagctcagctaacctttgaatatctgcacacaaattcgtaagtatcctctaggtgccactgaggtaaccagtaactcgttccttgatattatatggaaatcgtttccccagaaaattttgctttttcactttttgagatgtatcccactggagtgaaatgtgtcactggatatcttgagctctgtattgaagaactgagatcagtgaaatacttgttgctaatccagaagaatctgatttttgtttattggatcaaaattttctaaatgcaaactttagttatttgaagtcaatatgttgagttgtttcattcaagtgtttataggaatccaacaaatactgctctattggatcgccaaatgttggactattttagtatcaaccgtttcccctctgtagtgacaacgtcctaaacagttaggtttataacaagtgtttactttctaacaagaaaacagaagacatttaaatgacaactttcaagaagaaaatttttattttttcagaagttggcattatcttcctggcagattgctcacatccaatattatttgtatatgctaaacaggaaacggcaacttgtttatatctctatttagatagtctttccccaaaatttccacagaaacatacagtgttcatggttcttgagttcatgaaggagtaatctaatcactccaacatggtctggaatgtttcaggtttaatccatatgcccactctcttggaggctgtccagtagcgtcaaaactttagtgttttaatacattcacctgttacttttgagatgaagttcacctttcttggatcacatgcaaaggatgtttaggtctgtgaagaaaagaatttctaggccgggtgctgtggctcacgcctgtaatcccagcactttgggaggccgagaaccactcacgaattcttgtttggtgcccttgctgaactggttgataatgcaagagatgctgatgccaccagaatagatatttatgcagaaagacgagaggaccttcgaggaggatttatgctttgctttttggatgatggagcaggaatggatccaagtgatgctgccagtgtgatccagtttgggaagtcggccaagcgaacacctgagtctactcagattgggcagtacgggaatgggttaaaatcgggctcaatgcgcattgggaaggattttatcctgttcaccaagaaggaagacaccatgacctgcctcttcctgtctcgcacgtttcatgaggaagaaggcattgatgaagtgatagtcccactgcccacctggaatgctcggacccgggaacctgtcacagacaatgtagagaaatttgccattgagacagaactcatctataagtactctccattccgcactgaggaggaagtgatgacccagtttatgaagattcctggggacagcggaacattggtgatcatcttcaatctcaaactcatggataatggagagccagaactagacataatctcaaatccaagagatatccagatggcagagacgtccccagagggcacgaagccagagcggcgctcgttccgtgcctatgccgctgtgctctatattgatccccggatgaggatcttcatccatgggcacaaggtgcagaccaagaggctctcctgctgcctgtacaagcccaggatgtacaagtacacgtcaagccgtttcaagacccgtgcggagcaggaggtgaagaaagcagagcacgtagcaaggattgctgaagagaaggcgcgggaggcagagagcaaagctcggacattagaagtacgcctaggtggagacctcacgcgggactccagggtgatgttgcgacaggtccagaacagagccatcactctgcgcagagaagccgatgtcaagaagaggatcaaggaggccaagcagcgagcacttaaagaacctaaggaactgaattttgtttttggtgtcaacattgaacaccgggatctggatggcatgttcatctacaactgtagccgactgatcaaaatgtatgagaaagtgggcccacagctggaagggggcatggcatgtggcggggttgttggggttgttgatgtgccctacctggtcctggagcctacacacaacaaacaggactttgctgatgccaaggagtaccggcacctgctccgagcaatgggggagcacctggcgcagtattggaaggatattgccatcgcccagaggggaatcatcaagttctgggatgagtttggctacctctctgccaactggaaccagcccccatccagtgagctgcgttacaaacgccggagagctatggaaatccccaccaccatccagtgcgatttgtgtctgaaatggagaaccctccccttccagctgagttctgtggaaaaagattaccctgacacctgggtttgctccatgaaccctgatcctgaacaggaccggtgtgaggcttctgaacaaaagcagaaggttcccctgggaacattcagaaaggacatgaagacgcaggaagagaagcagaaacaactgacagagaaaattcgccagcagcaggagaagctggaggcccttcagaaaaccacacccatccgctcccaagcagacctgaagaaattgcccttggaagtgaccaccagaccttccactgaggaacctgtgcgtagacctcagcgtcctcggtcgccccctttacctgctgtgatcaggaacgcccccagcagacccccttctttgccaactcctagaccagccagccagccccgaaaggctcctgtcatcagcagtaccccaaagctccctgctttggcagcccgggaggaggccagcacatctaggctgctccagccacctgaggcaccccgaaagcctgccaacactctcgtcaagactgcatcccgacctgcccctctggtgcagcaactgtcaccatctttactgcccaactccaagagccctcgggaggttccttctcccaaagtcatcaagactccagtggtgaagaagacagagtcacccatcaaactctccccggctacccctagtcggaagcggagtgtcgcagtttctgatgaggaagaagttgaggaggaagctgagaggaggaaggagaggtgcaagcggggcagatttgttgtgaaggaggaaaagaaggactcgaatgagctctcagacagtgctggggaagaggactcggctgacctcaagagagctcagaaagataaagggctgcacgtggaggtgcgtgtgaacagggagtggtacacgggccgtgtcacagccgtggaggtgggcaagcatgtggtgcggtggaaggtgaagtttgactacgtgcccacagacacgacaccaagagaccgctgggtggagaaaggcagtgaggatgtgcggctgatgaaacccccttctccggaacatcagagccttgatacacaacaggagggcggggaggaggaggtgggccctgtggcccagcaggccatagctgtcgcagagccctccacttccgaatgcctccgcattgagcctgacaccactgccctgagcaccaatcacgagaccatcgacctgcttgtccagatcctccggaattgtttacggtacttcctgcctccaagtttccccatctccaagaagcagctgagtgctatgaattcagatgagctaatatcttttcctctgaaggagtacttcaagcaatatgaagtagggctccaaaacctgtgcaattcctaccagagccgtgctgactcccgggccaaggcctccgaggaaagcctgcgcacctccgagaggaagctccgcgagacggaggagaagctgcagaagctgaggaccaacatcgtggcactcctgcaaaaggtgcaggaggacatagacatcaacacagatgatgagctggacgcctacattgaggacctcatcaccaagggggactgaaggcaggagagagagcagctcccctgcccacctgcccctcaaccctgtagctgcagggggaggggacttcattcatgggttggtggtcgcaccttggtttgacttacacgggacatttgtgtttttggaggaaaagataccctgattctttgaatcttccttaagtttataaatatttattttttaaaagaa

SEQ ID NO: 8871 - protein, 970 aa, Homo sapiens; identical to SEQ ID NO: 1276

SEQ ID NO: 8872 - DNA, 6368 bp, Homo sapiens
ggcgggagctctggcggcagccccggggtggggagacgagctccggagtcggaagagctgggttttcttccgggcctagccaccagttggcggagtgaccttaggcgagtcactctgtaatttgtctgcgcctcagtttcctcctctgcctatcaatgtgtgtggggttgaaatcgctttgtaaactataaagcgtgggtgtacgtaaaggatggttattgtttataattttttttgagttgtaagaaaacttagcagttccccaatccttgggttttgaacctgggaaccttggattggagttggggatccccaaacttcctgaaattgtgggaatgtgcggtttgggggaatgatgggaatttgtgggaatgtgcgttttaggggaatgatgatccatcgctagcaagttttccaagggggctgtgacccagaagagttaagaatcacaatttcttcatgctacagagaggaaactgaggcctagatgtcatttgggacccttcacaaccattttgaagccctgtttgagtccctgggatatgtgagctgtttctatgcataatggatattcggggttaacaacagtcccctgcttggcttctattctgaatccttttctttcaccatggggtgcctgaagggtggctgatgcatatggtacaatggcacccagtgtaaagcagctacaattaggagtggatgtgttctgtagcatcctatttaaataagcctattttatcctttggcccgtcaactctgttatctgctgcttgtactggtgcctgtacttttctgactctcattgaccatattccacgaccatggttgtcatccattacttgatcctactttacatgtctaggctgtgtggttggtggtgaataggcttctttttacatggtgctgccagcccagctaattaatggtgcacgtggacttttagcaagcgggctcactggaagagactgaacctggcatggaattcctgaagatgtttggggtttttttctttcttaatcgaaagttaacattgtctgaaaagttttgttagaactactgcggaacctcaaaatcagtagatttggaagtgattcaaagctaaactttttccttggccctccttgtgttctaattgcttgcaagtgtaatactaggatgtccaagatgccagtttttgcttctttgttagttgtcagctgcttttatcaaatttcaggccattatccaacaaacactataaaaatgtttgaacaattggatttcaaacattttcgttttgtggagtggtgctcaccaagtggtacagccctaagcaagtgaacacaaacacatttaagtgtattttgtctgattagatgttagccagttatgctatttcattcaaatgtctgaaaaaatcaattgactattcccttttcctaaagggcagagacagataatctcacttccagagaaatgacttggagaaaaaaaagtgttggtctttttgctcttttgtaattaaatccggatgtacctcaaaagacttaagactgtggtgataagatgctttcctcagcagaaaggagggaaaaaaaacaactggaactcaaagcttgaaattctgtggcaaaacatgagatgtccaggattggaggttgaaaagatttcactacagtgttctgcaatagttggagcagataactttcagtgtagccacagccatggactccagatttccagattttcaagacctggacctggaacccgaaagagcttgtcacgatgcggcaggaacactggaggtagatttttttttatttttgaattttgggactgttgaccttgctgtgagaaaagagacaacgactgagcaagcactaccaccagcactgttactgggaattagaagacctgagtttctgtccagaccctcagtgcaaactgaggatgctccatccaaagtgaattatgtcctgtgcctcctgattgctgagtgttcacctggaccttctgactaccttccctgtgctattccatcagcctacagacctggtacctggatttttgcccgagatgattcctaccaccttactactgacgaagacacccattccagtggaccactgtgacccaggaggcattcagccatcatgatgtggcctttacctccactcctgtcttgttctacccagattcagcacagccctttatagtgaagtcagagtcctcaagccaaatagctaaagctgttttatcacaacaaaggcctagtttgttccatgagtgtgcatttcatttcttcagttaaagccttcagagacacacaataaatttggaccaggggattttttagttattaatgctctctgaagaaaggcaacatctttttgagagcagcattggaccacaccccacaatctcaaatgattgaaattcatgaacatctaggatcccgtgaaggtcactggaccctgttttttctacttcaaatcctgtagtagcctactgaatgagaaaacatattctgacccattgggatcaaatcaaaggcacagtgaactcctcatagcatcttctttggaattactcaggaaccagaactttttacacaaatgtaagaaattctaccaaggagtccccttacctaacagcatctcacaaggctgcaccagattccagaaaaggcttctcttgatacatcaagcattttgtgaccgacttattcttagatcattggttttccaaaggctttgtggccatgaagccctttgagtgaaaactgtgcagaagcccagagtaaaagtgaagctgctctggatgaagtagtgaagcaagagtaggggcctgaatcctgctacaactatcttcctttaccaccgtggtgacacctaaggggacttccttacaacaccttgaactcttccgaacacagtttgaaaaccactgccccagacagcaatatgtttgacctgaatggcattccaatcttttctgtacctccactcagcacagttcatgttcagtagatgctgaacattcttagaaatactgtgtgtgaacttagaaaagtgcaagaagacaggcatgtctttgaccccaggaatgatcatttgctgaagatggtgtcaagtgaacctagattaacagccctccactccagatggatatccagtgattcctagaatgggatatagccagagaacaattctatgcaccctacactgacagactcccttaagcaacaccagatgctctactggtacttgaagtacatgactttgaagtcttgaccctccatgaatacctgaattatcagcaagcgggttttgaagctggtgcctcattgaggccatattagagcaacttgtacatttgacctcttgttatcagccatggtactctacttcgtgtgcaagagataactatgaaagccaaattcaaatactggcaacatttcctaaaggggctcaatatctatcattcgtcttcttttccaaactacacatcactgtatgactcaaccagtagcagttatattgccccttggtttttattcagtttaactactgtttccaagataaatgagctaataagctttaaaaaaaaaaaaaaaaaaggctgaattcttttttcttcatcactggcatatctgcctattctccagaattattatgactattcagctcactttaacagttgaacttcaagcgacaatctttgaacaccccttctcatgtgatttaaaatgaaaccatttggaaaagtttcttctagccagtaatagattttttttttaattgctctgccttgtgccgagagatgttcttttaagatgaatcttttgatgtctgataccaccaaatataggtggtagggagagttggaggctggccctttgagcaggccattagcttacttgctgggcatttccgatagcttattgcctacctttttgctggaaacaaactgatttgaaaaacaaaatctatgaagactgcagctaaggattttatcggtagacttaagagcttttgtccttgtggatattttagtggaaccacatcagtctcaatactgtcattttacactgactcagagcagctgacttcattccttgccatgatatatatttaaggcaggcattgtaacagacataaagacaacttatctgtttcagcaggaaggattcagtttatgaactctcagaccagatcatgttgaacaaggagactttgatgtgtgtcatgagaaaactcattctttacttcccagtcaatttaaaggccagctatcctgagctactcgaatgaatgcactggttaaacattggaaatagtttgtttatatccttgtctctctctaggccaattgtgattacatgactcgactctacatctcgtcaaacaaggcctaggtctggttgctgtagactgctcgccctcaacaaataaaatctggttgactagcctccttgtatatacaactattatttgttaagaagaaattatcgtcaattttctactaccttccaattgtcagctctttttttcctctctggtttttcctatactttacagaaaaagacattgatctatactgccattccctctaatcctgccatactcagtcaaaaggaatgacttaagatgaagatgatcatctgctcgagtctaaaatatacattgtatataagaattggtgattagaaaagcaaaaaacctaaaacttaaatctaggagtctgtatactgtctccatgtctccatgcctcagatctcatctaaatctttgaacagcaccattcaaccaatctgaggccttgacttgcttgtaagatgattctcagagatcggctgagttaaaaaagatgacgacttgattaccaaagaaagtagggccaactttgacaaatctggctctgctgaccctgtcactcccagatgtagcatagactcctaaacagaacctcaagtctgattgaggataaggccttctcctgagctgaaagttctttggcagatgagcaagaaactgaaagctgatgtacctgactggctctgtaagatcagaaaactgtatccagaataagccctatggattaacccctgagtacccagagtaaaaactaatttacagaacttccttattgatctgctggttcttccagatcatattctggctattggtatggctggcctttctgaaggtaccctgcttgtctattttcctgactcagctcttgcctgcctttttcacatgttgctgcaattagactcaccgtgaggactacagtcaatttcagtctatcttgtgcccaatacaacaaggatttttaatagtaacaacccacacctcacccactaggactcaatgttcacaacaggaaggaccattgctgcatactccttgaccagcaacttttttgaagatatttttaagtgcagagtaggcctctattcctgtatgtaattgttcattttcagcacctggaacctcatctatcgggtctggaaggaatacagcagttcgaaagccgcgtccatttctctccttcagtagtgcagaaatgagtccgattcaccagtacacacagaactgtaccagttcaacctagcaaaagaagaaaagtttccactgtacttaaaatttacagctgactcaaattgcctcacagaattatttgatgtagaaggctagttgtcttacttcagatcagcaggacagttgggctctcagactcatgaccactgagtttgcttgtgttgaaactgtggtttcatccaacatatgctattggacatgattattattccattcaaatggattacagacttcttgaggacaggacaaacttatctctcatggtgtttttttagaatacttttataaccaaggaagaaaccatgccagctgttaccattcaacttcttaagcagagattaagctttttcatatctgttcttatcctggacatcagtagtttttaattgcccagcatccgttccatcttgtaacaactccctgatgtttcttaaaaccacctcttcctattttcagtctgtggtttggacagtctgacccaaccttgagctttgtgggtgaacatgtaattcagacctcatcaatcagcaaatccatctgaactgtggaggagaagctctctttactgagggtgctttagctttgtaggatgaaaacctcaaactaacagggcctaccatgtagagaatgaagccagtgcaggggaaagcagagccaaaatatggagagacttgaatcctgatgacagcgtttgtgcccctggatccaaccgtgcctgaagctagaatatcccctggacttttcagttatgtgaaccaataaatacccttttttgcttaagtt

SEQ ID NO: 8873 - protein, 135 aa, Homo sapiens
MDSRFPDFQDLDLEPERACHDAAGTLEVDFFLFLNFGTVDLAVRKETTTEQALPPALLLGIRRPEFLSRPSVQTEDAPSKVNYVLCLLIAECSPGPSDYLPCAIPSAYRPGTWIFARDDSYHLTTDEDTHSSGPL

SEQ ID NO: 8874 - DNA, 6915 bp, Homo sapiens
ggcgggagctctggcggcagccccggggtggggagacgagctccggagtcggaagagctgggttttcttccgggcctagccaccagttggcggagtgaccttaggcgagtcactctgtaatttgtctgcgcctcagtttcctcctctgcctatcaatgtgtgtggggttgaaatcgctttgtaaactataaagcgtgggtgtacgtaaaggatggttattgtttataattttttttgagttgtaagaaaacttagcagttccccaatccttgggttttgaacctgggaaccttggattggagttggggatccccaaacttcctgaaattgtgggaatgtgcggtttgggggaatgatgggaatttgtgggaatgtgcgttttaggggaatgatgatccatcgctagcaagttttccaagggggctgtgacccagaagagttaagaatcacaatttcttcatgctacagagaggaaactgaggcctagatgtcatttgggacccttcacaaccattttgaagccctgtttgagtccctgggatatgtgagctgtttctatgcataatggatattcggggttaacaacagtcccctgcttggcttctattctgaatccttttctttcaccatggggtgcctgaagggtggctgatgcatatggtacaatggcacccagtgtaaagcagctacaattaggagtggatgtgttctgtagcatcctatttaaataagcctattttatcctttggcccgtcaactctgttatctgctgcttgtactggtgcctgtacttttctgactctcattgaccatattccacgaccatggttgtcatccattacttgatcctactttacatgtctaggctgtgtggttggtggtgaataggcttctttttacatggtgctgccagcccagctaattaatggtgcacgtggacttttagcaagcgggctcactggaagagactgaacctggcatggaattcctgaagatgtttggggtttttttctttcttaatcgaaagttaacattgtctgaaaagttttgttagaactactgcggaacctcaaaatcagtagatttggaagtgattcaaagctaaactttttccttggccctccttgtgttctaattgcttgcaagtgtaatactaggatgtccaagatgccagtttttgcttctttgttagttgtcagctgcttttatcaaatttcaggccattatccaacaaacactataaaaatgtttgaacaattggatttcaaacattttcgttttgtggagtggtgctcaccaagtggtacagccctaagcaagtgaacacaaacacatttaagtgtattttgtctgattagatgttagccagttatgctatttcattcaaatgtctgaaaaaatcaattgactattcccttttcctaaagggcagagacagataatctcacttccagagaaatgacttggagaaaaaaaagtgttggtctttttgctcttttgtaattaaatccggatgtacctcaaaagacttaagactgtggtgataagatgctttcctcagcagaaaggagggaaaaaaaacaactggaactcaaagcttgaaattctgtggcaaaacatgagatgtccaggattggaggttgaaaagatttcactacagtgttctgcaatagttggagcagataactttcagtgtagccacagccatggactccagatttccagattttcaagacctggacctggaacccgaaagagcttgtcacgatgcggcaggaacactggaggtagatttttttttatttttgaattttgggactgttgaccttgctgtgagaaaagagacaacgactgagcaagcactaccaccagcactgttactgggaattagaagacctgagtttctgtccagaccctcagtgcaaactgaggatgctccatccaaagtgaattatgtcctgtgcctcctgattgctgagtgttcacctggaccttctgactaccttccctgtgctattccatcagcctacagacctggtacctggatttttgcccgagatgattcctaccaccttactactgacgaagacacccattccagtggaccactgtgacccaggaggcattcagccatcatgatgtggcctttacctccactcctgtcttgttctacccagattcagcacagccctttatagtgaagtcagagtcctcaagccaaatagctaaagctgttttatcacaacaaaggcctagtttgttccatgagtgtgcatttcatttcttcagttaaagccttcagagacacacaataaatttggaccaggggattttttagttattaatgctctctgaagaaaggcaacatctttttgagagcagcattggaccacaccccacaatctcaaatgattgaaattcatgaacatctaggatcccgtgaaggtcactggaccctgttttttctacttcaaatcctgtagtagcctactgaatgagaaaacatattctgacccattgggatcaaatcaaaggcacagtgaactcctcatagcatcttctttggaattactcaggaaccagaactttttacacaaatgtaagaaattctaccaaggagtccccttacctaacagcatctcacaaggctgcaccagattccagaaaaggcttctcttgatacatcaagcattttgtgaccgacttattcttagatcattggttttccaaaggctttgtggccatgaagccctttgagtgaaaactgtgcagaagcccagagtaaaagtgaagctgctctggatgaagtagtgaagcaagagtaggggcctgaatcctgctacaactatcttcctttaccaccgtggtgacacctaaggggacttccttacaacaccttgaactcttccgaacacagtttgaaaaccactgccccagacagcaatatgtttgacctgaatggcattccaatcttttctgtacctccactcagcacagttcatgttcagtagatgctgaacattcttagaaatactgtgtgtgaacttagaaaagtgcaagaagacaggcatgtctttgaccccaggaatgatcatttgctgaagatggtgtcaagtgaacctagattaacagccctccactccagatggatatccagtgattcctagaatgggatatagccagagaacaattctatgcaccctacactgacagactcccttaagcaacaccagatgctctactggtacttgaagtacatgactttgaagtcttgaccctccatgaatacctgaattatcagcaagcgggttttgaagctggtgcctcattgaggccatattagagcaacttgtacatttgacctcttgttatcagccatggtactctacttcgtgtgcaagagataactatgaaagccaaattcaaatactggcaacatttcctaaaggggctcaatatctatcattcgtcttcttttccaaactacacatcactgtatgactcaaccagtagcagttatattgccccttggtttttattcagtttaactactgtttccaagataaatgagctaataagctttaaaaaaaaaaaaaaaaaaggctgaattcttttttcttcatcactggcatatctgcctattctccagaattattatgactattcagctcactttaacagttgaacttcaagcgacaatctttgaacaccccttctcatgtgatttaaaatgaaaccatttggaaaagtttcttctagccagtaatagattttttttttaattgctctgccttgtgccgagagatgttcttttaagatgaatcttttgatgtctgataccaccaaatataggtggtagggagagttggaggctggccctttgagcaggccattagcttacttgctgggcatttccgatagcttattgcctacctttttgctggaaacaaactgatttgaaaaacaaaatctatgaagactgcagctaaggattttatcggtagacttaagagcttttgtccttgtggatattttagtggaaccacatcagtctcaatactgtcattttacactgactcagagcagctgacttcattccttgccatgatatatatttaaggcaggcattgtaacagacataaagacaacttatctgtttcagcaggaaggattcagtttatgaactctcagaccagatcatgttgaacaaggagactttgatgtgtgtcatgagaaaactcattctttacttcccagtcaatttaaaggccagctatcctgagctactcgaatgaatgcactggttaaacattggaaatagtttgtttatatccttgtctctctctaggccaattgtgattacatgactcgactctacatctcgtcaaacaaggcctaggtctggttgctgtagactgctcgccctcaacaaataaaatctggttgactagcctccttgtatatacaactattatttgttaagaagaaattatcgtcaattttctactaccttccaattgtcagctctttttttcctctctggtttttcctatactttacagaaaaagacattgatctatactgccattccctctaatcctgccatactcagtcaaaaggaatgacttaagatgaagatgatcatctgctcgagtctaaaatatacattgtatataagaattggtgattagaaaagcaaaaaacctaaaacttaaatctaggagtctgtatactgtctccatgtctccatgcctcagatctcatctaaatctttgaacagcaccattcaaccaatctgaggccttgacttgcttgtaagatgattctcagagatcggctgagttaaaaaagatgacgacttgattaccaaagaaagtagggccaactttgacaaatctggctctgctgaccctgtcactcccagatgtagcatagactcctaaacagaacctcaagtctgattgaggataaggccttctcctgagctgaaagttctttggcagatgagcaagaaactgaaagctgatgtacctgactggctctgtaagatcagaaaactgtatccagaataagccctatggattaacccctgagtacccagagtaaaaactaatttacagaacttccttattgatctgctggttcttccagatcatattctggctattggtatggctggcctttctgaaggtaccctgcttgtctattttcctgactcagctcttgcctgcctttttcacatgttgctgcaattagactcaccgtgaggactacagtcaatttcagtctatcttgtgcccaatacaacaaggatttttaatagtaacaacccacacctcacccactaggactcaatgttcacaacaggaaggaccattgctgcatactccttgaccagcaacttttttgaagatatttttaagtgcagagtaggcctctattcctgtatgtaattgttcattttcagcacctggaacctcatctatcgggtctggaaggaatacagcagttcgaaagccgcgtccatttctctccttcagtagtgcagaaatgagtccgattcaccagtacacacagaactgtaccagttcaacctagcaaaagaagaaaagtttccactgtacttaaaatttacagctgactcaaattgcctcacagaattatttgatgtagaaggctagttgtcttacttcagatcagcaggacagttgggctctcagactcatgaccactgagtttgcttgtgttgaaactgtggtttcatccaacatatgctattggacatgattattattccattcaaatggattacagacttcttgaggacaggacaaacttatctctcatggtgtttttttagaatacttttataaccaaggaagaaaccatgccagctgttaccattcaacttcttaagcagagattaagctttttcatatctgttcttatcctggacatcagtagtttttaattgcccagcatccgttccatcttgtaacaactccctgatgtttcttaaaaccacctcttcctattttcagtctgtggtttggacagtctgacccaaccttgagctttgtgggtgaacatgtaattcagacctcatcaatcagcaaatccatctgaactgtggaggagaagctctctttactgagggtgctttagctttgtaggatgaaaacctcaaactaacagggcctaccatgtagagaatgaagccagtgcaggggaaagcagagccaaaatatggagagacttgaatcctgatgacagcgtttgtgcccctggatccaaccgtgcctgaagctagaatatcccctggacttttcagttatgtgaaccaataaatacccttttttgcttaagttactttgagttgggtttctgttacttgaaattgaatccacactaatatatctaccaacattgagacttgacagatccaagtatttattaagctagaggtcatggtcactgaaattactttccaaagtggaagacaaaatgaaacaggaactgagggaatatttaagatcccacagaagcgtaaaaatgacatggtagaaagtaatagaaaacctaaatgtctgtcattaaaggataggttaaggtgtggttcagccatataggaatatctcgtatctgttaaaatgaataaagtacattcattgtgtatggaaaaatggccatgatacattaggtgaaacaagttattaatagaaaagtgtacagtgtgaactcattttaaaatgtgtgtgcttatgtttataaatgcatagaaaggtctattcacagctttctttgaacagtgtagatcacatgaaactttcaactttatacatttctgtattaatattttacactacccacattatttttaaactttattttaaataaagaatttttaaaattaaa

SEQ ID NO: 8875 - protein, 135 aa, Homo sapiens; identical to SEQ ID NO: 8873

SEQ ID NO: 8876 - DNA, 5416 bp, Homo sapiens
tttctttcttaatcgaaagttaacattgtctgaaaagttttgttagaactactgcggaacctcaaaatcagtagatttggaagtgattcaaagctaaactttttccttggccctccttgtgttctaattgcttgcaagtgtaatactaggatgtccaagatgccagtttttgcttctttgttagttgtcagctgcttttatcaaatttcaggccattatccaacaaacactataaaaatgtttgaacaattggatttcaaacattttcgttttgtggagtggtgctcaccaagtggtacagccctaagcaagtgaacacaaacacatttaagtgtattttgtctgattagatgttagccagttatgctatttcattcaaatgtctgaaaaaatcaattgactattcccttttcctaaagggcagagacagataatctcacttccagagaaatgacttggagaaaaaaaagtgttggtctttttgctcttttgtaattaaatccggatgtacctcaaaagacttaagactgtggtgataagatgctttcctcagcagaaaggagggaaaaaaaacaactggaactcaaagcttgaaattctgtggcaaaacatgagatgtccaggattggaggttgaaaagatttcactacagtgttctgcaatagttggagcagataactttcagtgtagccacagccatggactccagatttccagattttcaagacctggacctggaacccgaaagagcttgtcacgatgcggcaggaacactggaggtagatttttttttatttttgaattttgggactgttgaccttgctgtgagaaaagagacaacgactgagcaagcactaccaccagcactgttactgggaattagaagacctgagtttctgtccagaccctcagtgcaaactgaggatgctccatccaaagtgaattatgatagcagactccttgaaagcagggtccttgtttagtgcatctttgcccacatacaccacaacatatcaagatgcatttattaggaaggaggagtttagagagcaggctatcagaataaccactcacctacagacctggtacctggatttttgcccgagatgattcctaccaccttactactgacgaagacacccattccagtggaccactgtgacccaggaggcattcagccatcatgatgtggcctttacctccactcctgtcttgttctacccagattcagcacagccctttatagtgaagtcagagtcctcaagccaaatagctaaagctgttttatcacaacaaaggcctagtttgttccatgagtgtgcatttcatttcttcagttaaagccttcagagacacacaataaatttggaccaggggattttttagttattaatgctctctgaagaaaggcaacatctttttgagagcagcattggaccacaccccacaatctcaaatgattgaaattcatgaacatctaggatcccgtgaaggtcactggaccctgttttttctacttcaaatcctgtagtagcctactgaatgagaaaacatattctgacccattgggatcaaatcaaaggcacagtgaactcctcatagcatcttctttggaattactcaggaaccagaactttttacacaaatgtaagaaattctaccaaggagtccccttacctaacagcatctcacaaggctgcaccagattccagaaaaggcttctcttgatacatcaagcattttgtgaccgacttattcttagatcattggttttccaaaggctttgtggccatgaagccctttgagtgaaaactgtgcagaagcccagagtaaaagtgaagctgctctggatgaagtagtgaagcaagagtaggggcctgaatcctgctacaactatcttcctttaccaccgtggtgacacctaaggggacttccttacaacaccttgaactcttccgaacacagtttgaaaaccactgccccagacagcaatatgtttgacctgaatggcattccaatcttttctgtacctccactcagcacagttcatgttcagtagatgctgaacattcttagaaatactgtgtgtgaacttagaaaagtgcaagaagacaggcatgtctttgaccccaggaatgatcatttgctgaagatggtgtcaagtgaacctagattaacagccctccactccagatggatatccagtgattcctagaatgggatatagccagagaacaattctatgcaccctacactgacagactcccttaagcaacaccagatgctctactggtacttgaagtacatgactttgaagtcttgaccctccatgaatacctgaattatcagcaagcgggttttgaagctggtgcctcattgaggccatattagagcaacttgtacatttgacctcttgttatcagccatggtactctacttcgtgtgcaagagataactatgaaagccaaattcaaatactggcaacatttcctaaaggggctcaatatctatcattcgtcttcttttccaaactacacatcactgtatgactcaaccagtagcagttatattgccccttggtttttattcagtttaactactgtttccaagataaatgagctaataagctttaaaaaaaaaaaaaaaaaaggctgaattcttttttcttcatcactggcatatctgcctattctccagaattattatgactattcagctcactttaacagttgaacttcaagcgacaatctttgaacaccccttctcatgtgatttaaaatgaaaccatttggaaaagtttcttctagccagtaatagattttttttttaattgctctgccttgtgccgagagatgttcttttaagatgaatcttttgatgtctgataccaccaaatataggtggtagggagagttggaggctggccctttgagcaggccattagcttacttgctgggcatttccgatagcttattgcctacctttttgctggaaacaaactgatttgaaaaacaaaatctatgaagactgcagctaaggattttatcggtagacttaagagcttttgtccttgtggatattttagtggaaccacatcagtctcaatactgtcattttacactgactcagagcagctgacttcattccttgccatgatatatatttaaggcaggcattgtaacagacataaagacaacttatctgtttcagcaggaaggattcagtttatgaactctcagaccagatcatgttgaacaaggagactttgatgtgtgtcatgagaaaactcattctttacttcccagtcaatttaaaggccagctatcctgagctactcgaatgaatgcactggttaaacattggaaatagtttgtttatatccttgtctctctctaggccaattgtgattacatgactcgactctacatctcgtcaaacaaggcctaggtctggttgctgtagactgctcgccctcaacaaataaaatctggttgactagcctccttgtatatacaactattatttgttaagaagaaattatcgtcaattttctactaccttccaattgtcagctctttttttcctctctggtttttcctatactttacagaaaaagacattgatctatactgccattccctctaatcctgccatactcagtcaaaaggaatgacttaagatgaagatgatcatctgctcgagtctaaaatatacattgtatataagaattggtgattagaaaagcaaaaaacctaaaacttaaatctaggagtctgtatactgtctccatgtctccatgcctcagatctcatctaaatctttgaacagcaccattcaaccaatctgaggccttgacttgcttgtaagatgattctcagagatcggctgagttaaaaaagatgacgacttgattaccaaagaaagtagggccaactttgacaaatctggctctgctgaccctgtcactcccagatgtagcatagactcctaaacagaacctcaagtctgattgaggataaggccttctcctgagctgaaagttctttggcagatgagcaagaaactgaaagctgatgtacctgactggctctgtaagatcagaaaactgtatccagaataagccctatggattaacccctgagtacccagagtaaaaactaatttacagaacttccttattgatctgctggttcttccagatcatattctggctattggtatggctggcctttctgaaggtaccctgcttgtctattttcctgactcagctcttgcctgcctttttcacatgttgctgcaattagactcaccgtgaggactacagtcaatttcagtctatcttgtgcccaatacaacaaggatttttaatagtaacaacccacacctcacccactaggactcaatgttcacaacaggaaggaccattgctgcatactccttgaccagcaacttttttgaagatatttttaagtgcagagtaggcctctattcctgtatgtaattgttcattttcagcacctggaacctcatctatcgggtctggaaggaatacagcagttcgaaagccgcgtccatttctctccttcagtagtgcagaaatgagtccgattcaccagtacacacagaactgtaccagttcaacctagcaaaagaagaaaagtttccactgtacttaaaatttacagctgactcaaattgcctcacagaattatttgatgtagaaggctagttgtcttacttcagatcagcaggacagttgggctctcagactcatgaccactgagtttgcttgtgttgaaactgtggtttcatccaacatatgctattggacatgattattattccattcaaatggattacagacttcttgaggacaggacaaacttatctctcatggtgtttttttagaatacttttataaccaaggaagaaaccatgccagctgttaccattcaacttcttaagcagagattaagctttttcatatctgttcttatcctggacatcagtagtttttaattgcccagcatccgttccatcttgtaacaactccctgatgtttcttaaaaccacctcttcctattttcagtctgtggtttggacagtctgacccaaccttgagctttgtgggtgaacatgtaattcagacctcatcaatcagcaaatccatctgaactgtggaggagaagctctctttactgagggtgctttagctttgtaggatgaaaacctcaaactaacagggcctaccatgtagagaatgaagccagtgcaggggaaagcagagccaaaatatggagagacttgaatcctgatgacagcgtttgtgcccctggatccaaccgtgcctgaagctagaatatcccctggacttttcagttatgtgaaccaataaatacccttttttgcttaagtt

SEQ ID NO: 8877 - protein, 94 aa, Homo sapiens [sequence omitted]

SEQ ID NO: 8878 - DNA, 5963 bp, Homo sapiens
tttctttcttaatcgaaagttaacattgtctgaaaagttttgttagaactactgcggaacctcaaaatcagtagatttggaagtgattcaaagctaaactttttccttggccctccttgtgttctaattgcttgcaagtgtaatactaggatgtccaagatgccagtttttgcttctttgttagttgtcagctgcttttatcaaatttcaggccattatccaacaaacactataaaaatgtttgaacaattggatttcaaacattttcgttttgtggagtggtgctcaccaagtggtacagccctaagcaagtgaacacaaacacatttaagtgtattttgtctgattagatgttagccagttatgctatttcattcaaatgtctgaaaaaatcaattgactattcccttttcctaaagggcagagacagataatctcacttccagagaaatgacttggagaaaaaaaagtgttggtctttttgctcttttgtaattaaatccggatgtacctcaaaagacttaagactgtggtgataagatgctttcctcagcagaaaggagggaaaaaaaacaactggaactcaaagcttgaaattctgtggcaaaacatgagatgtccaggattggaggttgaaaagatttcactacagtgttctgcaatagttggagcagataactttcagtgtagccacagccatggactccagatttccagattttcaagacctggacctggaacccgaaagagcttgtcacgatgcggcaggaacactggaggtagatttttttttatttttgaattttgggactgttgaccttgctgtgagaaaagagacaacgactgagcaagcactaccaccagcactgttactgggaattagaagacctgagtttctgtccagaccctcagtgcaaactgaggatgctccatccaaagtgaattatgatagcagactccttgaaagcagggtccttgtttagtgcatctttgcccacatacaccacaacatatcaagatgcatttattaggaaggaggagtttagagagcaggctatcagaataaccactcacctacagacctggtacctggatttttgcccgagatgattcctaccaccttactactgacgaagacacccattccagtggaccactgtgacccaggaggcattcagccatcatgatgtggcctttacctccactcctgtcttgttctacccagattcagcacagccctttatagtgaagtcagagtcctcaagccaaatagctaaagctgttttatcacaacaaaggcctagtttgttccatgagtgtgcatttcatttcttcagttaaagccttcagagacacacaataaatttggaccaggggattttttagttattaatgctctctgaagaaaggcaacatctttttgagagcagcattggaccacaccccacaatctcaaatgattgaaattcatgaacatctaggatcccgtgaaggtcactggaccctgttttttctacttcaaatcctgtagtagcctactgaatgagaaaacatattctgacccattgggatcaaatcaaaggcacagtgaactcctcatagcatcttctttggaattactcaggaaccagaactttttacacaaatgtaagaaattctaccaaggagtccccttacctaacagcatctcacaaggctgcaccagattccagaaaaggcttctcttgatacatcaagcattttgtgaccgacttattcttagatcattggttttccaaaggctttgtggccatgaagccctttgagtgaaaactgtgcagaagcccagagtaaaagtgaagctgctctggatgaagtagtgaagcaagagtaggggcctgaatcctgctacaactatcttcctttaccaccgtggtgacacctaaggggacttccttacaacaccttgaactcttccgaacacagtttgaaaaccactgccccagacagcaatatgtttgacctgaatggcattccaatcttttctgtacctccactcagcacagttcatgttcagtagatgctgaacattcttagaaatactgtgtgtgaacttagaaaagtgcaagaagacaggcatgtctttgaccccaggaatgatcatttgctgaagatggtgtcaagtgaacctagattaacagccctccactccagatggatatccagtgattcctagaatgggatatagccagagaacaattctatgcaccctacactgacagactcccttaagcaacaccagatgctctactggtacttgaagtacatgactttgaagtcttgaccctccatgaatacctgaattatcagcaagcgggttttgaagctggtgcctcattgaggccatattagagcaacttgtacatttgacctcttgttatcagccatggtactctacttcgtgtgcaagagataactatgaaagccaaattcaaatactggcaacatttcctaaaggggctcaatatctatcattcgtcttcttttccaaactacacatcactgtatgactcaaccagtagcagttatattgccccttggtttttattcagtttaactactgtttccaagataaatgagctaataagctttaaaaaaaaaaaaaaaaaaggctgaattcttttttcttcatcactggcatatctgcctattctccagaattattatgactattcagctcactttaacagttgaacttcaagcgacaatctttgaacaccccttctcatgtgatttaaaatgaaaccatttggaaaagtttcttctagccagtaatagattttttttttaattgctctgccttgtgccgagagatgttcttttaagatgaatcttttgatgtctgataccaccaaatataggtggtagggagagttggaggctggccctttgagcaggccattagcttacttgctgggcatttccgatagcttattgcctacctttttgctggaaacaaactgatttgaaaaacaaaatctatgaagactgcagctaaggattttatcggtagacttaagagcttttgtccttgtggatattttagtggaaccacatcagtctcaatactgtcattttacactgactcagagcagctgacttcattccttgccatgatatatatttaaggcaggcattgtaacagacataaagacaacttatctgtttcagcaggaaggattcagtttatgaactctcagaccagatcatgttgaacaaggagactttgatgtgtgtcatgagaaaactcattctttacttcccagtcaatttaaaggccagctatcctgagctactcgaatgaatgcactggttaaacattggaaatagtttgtttatatccttgtctctctctaggccaattgtgattacatgactcgactctacatctcgtcaaacaaggcctaggtctggttgctgtagactgctcgccctcaacaaataaaatctggttgactagcctccttgtatatacaactattatttgttaagaagaaattatcgtcaattttctactaccttccaattgtcagctctttttttcctctctggtttttcctatactttacagaaaaagacattgatctatactgccattccctctaatcctgccatactcagtcaaaaggaatgacttaagatgaagatgatcatctgctcgagtctaaaatatacattgtatataagaattggtgattagaaaagcaaaaaacctaaaacttaaatctaggagtctgtatactgtctccatgtctccatgcctcagatctcatctaaatctttgaacagcaccattcaaccaatctgaggccttgacttgcttgtaagatgattctcagagatcggctgagttaaaaaagatgacgacttgattaccaaagaaagtagggccaactttgacaaatctggctctgctgaccctgtcactcccagatgtagcatagactcctaaacagaacctcaagtctgattgaggataaggccttctcctgagctgaaagttctttggcagatgagcaagaaactgaaagctgatgtacctgactggctctgtaagatcagaaaactgtatccagaataagccctatggattaacccctgagtacccagagtaaaaactaatttacagaacttccttattgatctgctggttcttccagatcatattctggctattggtatggctggcctttctgaaggtaccctgcttgtctattttcctgactcagctcttgcctgcctttttcacatgttgctgcaattagactcaccgtgaggactacagtcaatttcagtctatcttgtgcccaatacaacaaggatttttaatagtaacaacccacacctcacccactaggactcaatgttcacaacaggaaggaccattgctgcatactccttgaccagcaacttttttgaagatatttttaagtgcagagtaggcctctattcctgtatgtaattgttcattttcagcacctggaacctcatctatcgggtctggaaggaatacagcagttcgaaagccgcgtccatttctctccttcagtagtgcagaaatgagtccgattcaccagtacacacagaactgtaccagttcaacctagcaaaagaagaaaagtttccactgtacttaaaatttacagctgactcaaattgcctcacagaattatttgatgtagaaggctagttgtcttacttcagatcagcaggacagttgggctctcagactcatgaccactgagtttgcttgtgttgaaactgtggtttcatccaacatatgctattggacatgattattattccattcaaatggattacagacttcttgaggacaggacaaacttatctctcatggtgtttttttagaatacttttataaccaaggaagaaaccatgccagctgttaccattcaacttcttaagcagagattaagctttttcatatctgttcttatcctggacatcagtagtttttaattgcccagcatccgttccatcttgtaacaactccctgatgtttcttaaaaccacctcttcctattttcagtctgtggtttggacagtctgacccaaccttgagctttgtgggtgaacatgtaattcagacctcatcaatcagcaaatccatctgaactgtggaggagaagctctctttactgagggtgctttagctttgtaggatgaaaacctcaaactaacagggcctaccatgtagagaatgaagccagtgcaggggaaagcagagccaaaatatggagagacttgaatcctgatgacagcgtttgtgcccctggatccaaccgtgcctgaagctagaatatcccctggacttttcagttatgtgaaccaataaatacccttttttgcttaagttactttgagttgggtttctgttacttgaaattgaatccacactaatatatctaccaacattgagacttgacagatccaagtatttattaagctagaggtcatggtcactgaaattactttccaaagtggaagacaaaatgaaacaggaactgagggaatatttaagatcccacagaagcgtaaaaatgacatggtagaaagtaatagaaaacctaaatgtctgtcattaaaggataggttaaggtgtggttcagccatataggaatatctcgtatctgttaaaatgaataaagtacattcattgtgtatggaaaaatggccatgatacattaggtgaaacaagttattaatagaaaagtgtacagtgtgaactcattttaaaatgtgtgtgcttatgtttataaatgcatagaaaggtctattcacagctttctttgaacagtgtagatcacatgaaactttcaactttatacatttctgtattaatattttacactacccacattatttttaaactttattttaaataaagaatttttaaaattaaa

SEQ ID NO: 8879 - protein, 94 aa, Homo sapiens [sequence omitted]

SEQ ID NO: 8880 - DNA, 4256 bp, Homo sapiens
cactataaaaatgtttgaacaattggatttcaaacattttcgttttgtggagtggtgctcaccaagtggtacagccctaagcaagtgaacacaaacacatttaagtgtattttgtctgattagatgttagccagttatgctatttcattcaaatgtctgaaaaaatcaattgactattcccttttcctaaagggcagagacagataatctcacttccagagaaatgacttggagaaaaaaaagtgttggtctttttgctcttttgtaattaaatccggatgtacctcaaaagacttaagactgtggtgataagatgctttcctcagcagaaaggagggaaaaaaaacaactggaactcaaagcttgaaattctgtggcaaaacatgagatgtccaggattggaggttgaaaagatttcactacagtgttctgcaatagttggagcagataactttcagtgtagccacagccatggactccagatttccagattttcaagacctggacctggaacccgaaagagcttgtcacgatgcggcaggaacactggaggtagatttttttttatttttgaattttgggactgttgaccttgctgtgagaaaagagacaacgactgagcaagcactaccaccagcactgttactgggaattagaagacctgagtttctgtccagaccctcagtgcaaactgaggatgctccatccaaagtgaattatgtcctgtgcctcctgattgctgagtgttcacctggaccttctgactaccttccctgtgctattccatcagcctacagacctggtacctggatttttgtgccccagacagcaatatgtttgacctgaatggcattccaatcttttctgtacctccactcagcacagttcatgttcagtagatgctgaacattcttagaaatactgtgtgtgaacttagaaaagtgcaagaagacaggcatgtctttgaccccaggaatgatcatttgctgaagatggtgtcaagtgaacctagattaacagccctccactccagatggatatccagtgattcctagaatgggatatagccagagaacaattctatgcaccctacactgacagactcccttaagcaacaccagatgctctactggtacttgaagtacatgactttgaagtcttgaccctccatgaatacctgaattatcagcaagcgggttttgaagctggtgcctcattgaggccatattagagcaacttgtacatttgacctcttgttatcagccatggtactctacttcgtgtgcaagagataactatgaaagccaaattcaaatactggcaacatttcctaaaggggctcaatatctatcattcgtcttcttttccaaactacacatcactgtatgactcaaccagtagcagttatattgccccttggtttttattcagtttaactactgtttccaagataaatgagctaataagctttaaaaaaaaaaaaaaaaaaggctgaattcttttttcttcatcactggcatatctgcctattctccagaattattatgactattcagctcactttaacagttgaacttcaagcgacaatctttgaacaccccttctcatgtgatttaaaatgaaaccatttggaaaagtttcttctagccagtaatagattttttttttaattgctctgccttgtgccgagagatgttcttttaagatgaatcttttgatgtctgataccaccaaatataggtggtagggagagttggaggctggccctttgagcaggccattagcttacttgctgggcatttccgatagcttattgcctacctttttgctggaaacaaactgatttgaaaaacaaaatctatgaagactgcagctaaggattttatcggtagacttaagagcttttgtccttgtggatattttagtggaaccacatcagtctcaatactgtcattttacactgactcagagcagctgacttcattccttgccatgatatatatttaaggcaggcattgtaacagacataaagacaacttatctgtttcagcaggaaggattcagtttatgaactctcagaccagatcatgttgaacaaggagactttgatgtgtgtcatgagaaaactcattctttacttcccagtcaatttaaaggccagctatcctgagctactcgaatgaatgcactggttaaacattggaaatagtttgtttatatccttgtctctctctaggccaattgtgattacatgactcgactctacatctcgtcaaacaaggcctaggtctggttgctgtagactgctcgccctcaacaaataaaatctggttgactagcctccttgtatatacaactattatttgttaagaagaaattatcgtcaattttctactaccttccaattgtcagctctttttttcctctctggtttttcctatactttacagaaaaagacattgatctatactgccattccctctaatcctgccatactcagtcaaaaggaatgacttaagatgaagatgatcatctgctcgagtctaaaatatacattgtatataagaattggtgattagaaaagcaaaaaacctaaaacttaaatctaggagtctgtatactgtctccatgtctccatgcctcagatctcatctaaatctttgaacagcaccattcaaccaatctgaggccttgacttgcttgtaagatgattctcagagatcggctgagttaaaaaagatgacgacttgattaccaaagaaagtagggccaactttgacaaatctggctctgctgaccctgtcactcccagatgtagcatagactcctaaacagaacctcaagtctgattgaggataaggccttctcctgagctgaaagttctttggcagatgagcaagaaactgaaagctgatgtacctgactggctctgtaagatcagaaaactgtatccagaataagccctatggattaacccctgagtacccagagtaaaaactaatttacagaacttccttattgatctgctggttcttccagatcatattctggctattggtatggctggcctttctgaaggtaccctgcttgtctattttcctgactcagctcttgcctgcctttttcacatgttgctgcaattagactcaccgtgaggactacagtcaatttcagtctatcttgtgcccaatacaacaaggatttttaatagtaacaacccacacctcacccactaggactcaatgttcacaacaggaaggaccattgctgcatactccttgaccagcaacttttttgaagatatttttaagtgcagagtaggcctctattcctgtatgtaattgttcattttcagcacctggaacctcatctatcgggtctggaaggaatacagcagttcgaaagccgcgtccatttctctccttcagtagtgcagaaatgagtccgattcaccagtacacacagaactgtaccagttcaacctagcaaaagaagaaaagtttccactgtacttaaaatttacagctgactcaaattgcctcacagaattatttgatgtagaaggctagttgtcttacttcagatcagcaggacagttgggctctcagactcatgaccactgagtttgcttgtgttgaaactgtggtttcatccaacatatgctattggacatgattattattccattcaaatggattacagacttcttgaggacaggacaaacttatctctcatggtgtttttttagaatacttttataaccaaggaagaaaccatgccagctgttaccattcaacttcttaagcagagattaagctttttcatatctgttcttatcctggacatcagtagtttttaattgcccagcatccgttccatcttgtaacaactccctgatgtttcttaaaaccacctcttcctattttcagtctgtggtttggacagtctgacccaaccttgagctttgtgggtgaacatgtaattcagacctcatcaatcagcaaatccatctgaactgtggaggagaagctctctttactgagggtgctttagctttgtaggatgaaaacctcaaactaacagggcctaccatgtagagaatgaagccagtgcaggggaaagcagagccaaaatatggagagacttgaatcctgatgacagcgtttgtgcccctggatccaaccgtgcctgaagctagaatatcccctggacttttcagttatgtgaaccaataaatacccttttttgcttaagtt

SEQ ID NO: 8881 - protein, 124 aa, Homo sapiens
MDSRFPDFQDLDLEPERACHDAAGTLEVDFFLFLNFGTVDLAVRKETTTEQALPPALLLGIRRPEFLSRPSVQTEDAPSKVNYVLCLLIAECSPGPSDYLPCAIPSAYRPGTWIFVPQTAICLT

SEQ ID NO: 8882 - DNA, 4803 bp, Homo sapiens
cactataaaaatgtttgaacaattggatttcaaacattttcgttttgtggagtggtgctcaccaagtggtacagccctaagcaagtgaacacaaacacatttaagtgtattttgtctgattagatgttagccagttatgctatttcattcaaatgtctgaaaaaatcaattgactattcccttttcctaaagggcagagacagataatctcacttccagagaaatgacttggagaaaaaaaagtgttggtctttttgctcttttgtaattaaatccggatgtacctcaaaagacttaagactgtggtgataagatgctttcctcagcagaaaggagggaaaaaaaacaactggaactcaaagcttgaaattctgtggcaaaacatgagatgtccaggattggaggttgaaaagatttcactacagtgttctgcaatagttggagcagataactttcagtgtagccacagccatggactccagatttccagattttcaagacctggacctggaacccgaaagagcttgtcacgatgcggcaggaacactggaggtagatttttttttatttttgaattttgggactgttgaccttgctgtgagaaaagagacaacgactgagcaagcactaccaccagcactgttactgggaattagaagacctgagtttctgtccagaccctcagtgcaaactgaggatgctccatccaaagtgaattatgtcctgtgcctcctgattgctgagtgttcacctggaccttctgactaccttccctgtgctattccatcagcctacagacctggtacctggatttttgtgccccagacagcaatatgtttgacctgaatggcattccaatcttttctgtacctccactcagcacagttcatgttcagtagatgctgaacattcttagaaatactgtgtgtgaacttagaaaagtgcaagaagacaggcatgtctttgaccccaggaatgatcatttgctgaagatggtgtcaagtgaacctagattaacagccctccactccagatggatatccagtgattcctagaatgggatatagccagagaacaattctatgcaccctacactgacagactcccttaagcaacaccagatgctctactggtacttgaagtacatgactttgaagtcttgaccctccatgaatacctgaattatcagcaagcgggttttgaagctggtgcctcattgaggccatattagagcaacttgtacatttgacctcttgttatcagccatggtactctacttcgtgtgcaagagataactatgaaagccaaattcaaatactggcaacatttcctaaaggggctcaatatctatcattcgtcttcttttccaaactacacatcactgtatgactcaaccagtagcagttatattgccccttggtttttattcagtttaactactgtttccaagataaatgagctaataagctttaaaaaaaaaaaaaaaaaaggctgaattcttttttcttcatcactggcatatctgcctattctccagaattattatgactattcagctcactttaacagttgaacttcaagcgacaatctttgaacaccccttctcatgtgatttaaaatgaaaccatttggaaaagtttcttctagccagtaatagattttttttttaattgctctgccttgtgccgagagatgttcttttaagatgaatcttttgatgtctgataccaccaaatataggtggtagggagagttggaggctggccctttgagcaggccattagcttacttgctgggcatttccgatagcttattgcctacctttttgctggaaacaaactgatttgaaaaacaaaatctatgaagactgcagctaaggattttatcggtagacttaagagcttttgtccttgtggatattttagtggaaccacatcagtctcaatactgtcattttacactgactcagagcagctgacttcattccttgccatgatatatatttaaggcaggcattgtaacagacataaagacaacttatctgtttcagcaggaaggattcagtttatgaactctcagaccagatcatgttgaacaaggagactttgatgtgtgtcatgagaaaactcattctttacttcccagtcaatttaaaggccagctatcctgagctactcgaatgaatgcactggttaaacattggaaatagtttgtttatatccttgtctctctctaggccaattgtgattacatgactcgactctacatctcgtcaaacaaggcctaggtctggttgctgtagactgctcgccctcaacaaataaaatctggttgactagcctccttgtatatacaactattatttgttaagaagaaattatcgtcaattttctactaccttccaattgtcagctctttttttcctctctggtttttcctatactttacagaaaaagacattgatctatactgccattccctctaatcctgccatactcagtcaaaaggaatgacttaagatgaagatgatcatctgctcgagtctaaaatatacattgtatataagaattggtgattagaaaagcaaaaaacctaaaacttaaatctaggagtctgtatactgtctccatgtctccatgcctcagatctcatctaaatctttgaacagcaccattcaaccaatctgaggccttgacttgcttgtaagatgattctcagagatcggctgagttaaaaaagatgacgacttgattaccaaagaaagtagggccaactttgacaaatctggctctgctgaccctgtcactcccagatgtagcatagactcctaaacagaacctcaagtctgattgaggataaggccttctcctgagctgaaagttctttggcagatgagcaagaaactgaaagctgatgtacctgactggctctgtaagatcagaaaactgtatccagaataagccctatggattaacccctgagtacccagagtaaaaactaatttacagaacttccttattgatctgctggttcttccagatcatattctggctattggtatggctggcctttctgaaggtaccctgcttgtctattttcctgactcagctcttgcctgcctttttcacatgttgctgcaattagactcaccgtgaggactacagtcaatttcagtctatcttgtgcccaatacaacaaggatttttaatagtaacaacccacacctcacccactaggactcaatgttcacaacaggaaggaccattgctgcatactccttgaccagcaacttttttgaagatatttttaagtgcagagtaggcctctattcctgtatgtaattgttcattttcagcacctggaacctcatctatcgggtctggaaggaatacagcagttcgaaagccgcgtccatttctctccttcagtagtgcagaaatgagtccgattcaccagtacacacagaactgtaccagttcaacctagcaaaagaagaaaagtttccactgtacttaaaatttacagctgactcaaattgcctcacagaattatttgatgtagaaggctagttgtcttacttcagatcagcaggacagttgggctctcagactcatgaccactgagtttgcttgtgttgaaactgtggtttcatccaacatatgctattggacatgattattattccattcaaatggattacagacttcttgaggacaggacaaacttatctctcatggtgtttttttagaatacttttataaccaaggaagaaaccatgccagctgttaccattcaacttcttaagcagagattaagctttttcatatctgttcttatcctggacatcagtagtttttaattgcccagcatccgttccatcttgtaacaactccctgatgtttcttaaaaccacctcttcctattttcagtctgtggtttggacagtctgacccaaccttgagctttgtgggtgaacatgtaattcagacctcatcaatcagcaaatccatctgaactgtggaggagaagctctctttactgagggtgctttagctttgtaggatgaaaacctcaaactaacagggcctaccatgtagagaatgaagccagtgcaggggaaagcagagccaaaatatggagagacttgaatcctgatgacagcgtttgtgcccctggatccaaccgtgcctgaagctagaatatcccctggacttttcagttatgtgaaccaataaatacccttttttgcttaagttactttgagttgggtttctgttacttgaaattgaatccacactaatatatctaccaacattgagacttgacagatccaagtatttattaagctagaggtcatggtcactgaaattactttccaaagtggaagacaaaatgaaacaggaactgagggaatatttaagatcccacagaagcgtaaaaatgacatggtagaaagtaatagaaaacctaaatgtctgtcattaaaggataggttaaggtgtggttcagccatataggaatatctcgtatctgttaaaatgaataaagtacattcattgtgtatggaaaaatggccatgatacattaggtgaaacaagttattaatagaaaagtgtacagtgtgaactcattttaaaatgtgtgtgcttatgtttataaatgcatagaaaggtctattcacagctttctttgaacagtgtagatcacatgaaactttcaactttatacatttctgtattaatattttacactacccacattatttttaaactttattttaaataaagaatttttaaaattaaa

SEQ ID NO: 8883 - protein, 124 aa, Homo sapiens; identical to SEQ ID NO: 8881

SEQ ID NO: 8884 - DNA, 5104 bp, Homo sapiens
taaccactcagtaagtgttttcttaattgctatgtgataacttacattactcttaatgaggagaaaagtcgctagatatggatcatgtttatgttttaatgttttttaattctaaattttgatctagggagccctcagacataaggagaaaccaatatgttgaatgatggggtattacatacagaaggaccaagaccttattttctcctacttaagatggaatcttgttaagatgaaaggacagctttttaaaaggagaaggtcataagacagtttgaggaaggcattggaagaggaagaggggcaatgtctcctttgttttattgttggtatataaacttaaaatctcagttctttttatggcacttgtggagccacttcctctcctcaccaaaaaatgcccagtaccctgaatccgatcaaattactctcctaaagtataaggcttagtttctgtgtgctgcttcgcgagacagttcccacaaatcgagagtgttaatcagacttttgtgttttcttttttggattgctgttgtttgttttcatttatcatttgtctttgcctaagccaggctcatcaagaattaacagccatcaggctgccgatgtgctgacagcagacccacttagagtcctgtgtttgtaattccatgcatttgttattttacctgttttgtccctgccccttctagtcctgtgcctcctgattgctgagtgttcacctggaccttctgactaccttccctgtgctattccatcagcctacagacctggtacctggatttttgcccgagatgattcctaccaccttactactgacgaagacacccattccagtggaccactgtgacccaggaggcattcagccatcatgatgtggcctttacctccactcctgtcttgttctacccagattcagcacagccctttatagtgaagtcagagtcctcaagccaaatagctaaagctgttttatcacaacaaaggcctagtttgttccatgagtgtgcatttcatttcttcagttaaagccttcagagacacacaataaatttggaccaggggattttttagttattaatgctctctgaagaaaggcaacatctttttgagagcagcattggaccacaccccacaatctcaaatgattgaaattcatgaacatctaggatcccgtgaaggtcactggaccctgttttttctacttcaaatcctgtagtagcctactgaatgagaaaacatattctgacccattgggatcaaatcaaaggcacagtgaactcctcatagcatcttctttggaattactcaggaaccagaactttttacacaaatgtaagaaattctaccaaggagtccccttacctaacagcatctcacaaggctgcaccagattccagaaaaggcttctcttgatacatcaagcattttgtgaccgacttattcttagatcattggttttccaaaggctttgtggccatgaagccctttgagtgaaaactgtgcagaagcccagagtaaaagtgaagctgctctggatgaagtagtgaagcaagagtaggggcctgaatcctgctacaactatcttcctttaccaccgtggtgacacctaaggggacttccttacaacaccttgaactcttccgaacacagtttgaaaaccactgccccagacagcaatatgtttgacctgaatggcattccaatcttttctgtacctccactcagcacagttcatgttcagtagatgctgaacattcttagaaatactgtgtgtgaacttagaaaagtgcaagaagacaggcatgtctttgaccccaggaatgatcatttgctgaagatggtgtcaagtgaacctagattaacagccctccactccagatggatatccagtgattcctagaatgggatatagccagagaacaattctatgcaccctacactgacagactcccttaagcaacaccagatgctctactggtacttgaagtacatgactttgaagtcttgaccctccatgaatacctgaattatcagcaagcgggttttgaagctggtgcctcattgaggccatattagagcaacttgtacatttgacctcttgttatcagccatggtactctacttcgtgtgcaagagataactatgaaagccaaattcaaatactggcaacatttcctaaaggggctcaatatctatcattcgtcttcttttccaaactacacatcactgtatgactcaaccagtagcagttatattgccccttggtttttattcagtttaactactgtttccaagataaatgagctaataagctttaaaaaaaaaaaaaaaaaaggctgaattcttttttcttcatcactggcatatctgcctattctccagaattattatgactattcagctcactttaacagttgaacttcaagcgacaatctttgaacaccccttctcatgtgatttaaaatgaaaccatttggaaaagtttcttctagccagtaatagattttttttttaattgctctgccttgtgccgagagatgttcttttaagatgaatcttttgatgtctgataccaccaaatataggtggtagggagagttggaggctggccctttgagcaggccattagcttacttgctgggcatttccgatagcttattgcctacctttttgctggaaacaaactgatttgaaaaacaaaatctatgaagactgcagctaaggattttatcggtagacttaagagcttttgtccttgtggatattttagtggaaccacatcagtctcaatactgtcattttacactgactcagagcagctgacttcattccttgccatgatatatatttaaggcaggcattgtaacagacataaagacaacttatctgtttcagcaggaaggattcagtttatgaactctcagaccagatcatgttgaacaaggagactttgatgtgtgtcatgagaaaactcattctttacttcccagtcaatttaaaggccagctatcctgagctactcgaatgaatgcactggttaaacattggaaatagtttgtttatatccttgtctctctctaggccaattgtgattacatgactcgactctacatctcgtcaaacaaggcctaggtctggttgctgtagactgctcgccctcaacaaataaaatctggttgactagcctccttgtatatacaactattatttgttaagaagaaattatcgtcaattttctactaccttccaattgtcagctctttttttcctctctggtttttcctatactttacagaaaaagacattgatctatactgccattccctctaatcctgccatactcagtcaaaaggaatgacttaagatgaagatgatcatctgctcgagtctaaaatatacattgtatataagaattggtgattagaaaagcaaaaaacctaaaacttaaatctaggagtctgtatactgtctccatgtctccatgcctcagatctcatctaaatctttgaacagcaccattcaaccaatctgaggccttgacttgcttgtaagatgattctcagagatcggctgagttaaaaaagatgacgacttgattaccaaagaaagtagggccaactttgacaaatctggctctgctgaccctgtcactcccagatgtagcatagactcctaaacagaacctcaagtctgattgaggataaggccttctcctgagctgaaagttctttggcagatgagcaagaaactgaaagctgatgtacctgactggctctgtaagatcagaaaactgtatccagaataagccctatggattaacccctgagtacccagagtaaaaactaatttacagaacttccttattgatctgctggttcttccagatcatattctggctattggtatggctggcctttctgaaggtaccctgcttgtctattttcctgactcagctcttgcctgcctttttcacatgttgctgcaattagactcaccgtgaggactacagtcaatttcagtctatcttgtgcccaatacaacaaggatttttaatagtaacaacccacacctcacccactaggactcaatgttcacaacaggaaggaccattgctgcatactccttgaccagcaacttttttgaagatatttttaagtgcagagtaggcctctattcctgtatgtaattgttcattttcagcacctggaacctcatctatcgggtctggaaggaatacagcagttcgaaagccgcgtccatttctctccttcagtagtgcagaaatgagtccgattcaccagtacacacagaactgtaccagttcaacctagcaaaagaagaaaagtttccactgtacttaaaatttacagctgactcaaattgcctcacagaattatttgatgtagaaggctagttgtcttacttcagatcagcaggacagttgggctctcagactcatgaccactgagtttgcttgtgttgaaactgtggtttcatccaacatatgctattggacatgattattattccattcaaatggattacagacttcttgaggacaggacaaacttatctctcatggtgtttttttagaatacttttataaccaaggaagaaaccatgccagctgttaccattcaacttcttaagcagagattaagctttttcatatctgttcttatcctggacatcagtagtttttaattgcccagcatccgttccatcttgtaacaactccctgatgtttcttaaaaccacctcttcctattttcagtctgtggtttggacagtctgacccaaccttgagctttgtgggtgaacatgtaattcagacctcatcaatcagcaaatccatctgaactgtggaggagaagctctctttactgagggtgctttagctttgtaggatgaaaacctcaaactaacagggcctaccatgtagagaatgaagccagtgcaggggaaagcagagccaaaatatggagagacttgaatcctgatgacagcgtttgtgcccctggatccaaccgtgcctgaagctagaatatcccctggacttttcagttatgtgaaccaataaatacccttttttgcttaagtt

SEQ ID NO: 8885 - protein, 65 aa, Homo sapiens
MKAKFKYWQHFLKGLNIYHSSSFPNYTSLYDSTSSSYIAPWFLFSLTTVSKINELISFKKKKKKG

SEQ ID NO: 8886 - DNA, 5651 bp, Homo sapiens
taaccactcagtaagtgttttcttaattgctatgtgataacttacattactcttaatgaggagaaaagtcgctagatatggatcatgtttatgttttaatgttttttaattctaaattttgatctagggagccctcagacataaggagaaaccaatatgttgaatgatggggtattacatacagaaggaccaagaccttattttctcctacttaagatggaatcttgttaagatgaaaggacagctttttaaaaggagaaggtcataagacagtttgaggaaggcattggaagaggaagaggggcaatgtctcctttgttttattgttggtatataaacttaaaatctcagttctttttatggcacttgtggagccacttcctctcctcaccaaaaaatgcccagtaccctgaatccgatcaaattactctcctaaagtataaggcttagtttctgtgtgctgcttcgcgagacagttcccacaaatcgagagtgttaatcagacttttgtgttttcttttttggattgctgttgtttgttttcatttatcatttgtctttgcctaagccaggctcatcaagaattaacagccatcaggctgccgatgtgctgacagcagacccacttagagtcctgtgtttgtaattccatgcatttgttattttacctgttttgtccctgccccttctagtcctgtgcctcctgattgctgagtgttcacctggaccttctgactaccttccctgtgctattccatcagcctacagacctggtacctggatttttgcccgagatgattcctaccaccttactactgacgaagacacccattccagtggaccactgtgacccaggaggcattcagccatcatgatgtggcctttacctccactcctgtcttgttctacccagattcagcacagccctttatagtgaagtcagagtcctcaagccaaatagctaaagctgttttatcacaacaaaggcctagtttgttccatgagtgtgcatttcatttcttcagttaaagccttcagagacacacaataaatttggaccaggggattttttagttattaatgctctctgaagaaaggcaacatctttttgagagcagcattggaccacaccccacaatctcaaatgattgaaattcatgaacatctaggatcccgtgaaggtcactggaccctgttttttctacttcaaatcctgtagtagcctactgaatgagaaaacatattctgacccattgggatcaaatcaaaggcacagtgaactcctcatagcatcttctttggaattactcaggaaccagaactttttacacaaatgtaagaaattctaccaaggagtccccttacctaacagcatctcacaaggctgcaccagattccagaaaaggcttctcttgatacatcaagcattttgtgaccgacttattcttagatcattggttttccaaaggctttgtggccatgaagccctttgagtgaaaactgtgcagaagcccagagtaaaagtgaagctgctctggatgaagtagtgaagcaagagtaggggcctgaatcctgctacaactatcttcctttaccaccgtggtgacacctaaggggacttccttacaacaccttgaactcttccgaacacagtttgaaaaccactgccccagacagcaatatgtttgacctgaatggcattccaatcttttctgtacctccactcagcacagttcatgttcagtagatgctgaacattcttagaaatactgtgtgtgaacttagaaaagtgcaagaagacaggcatgtctttgaccccaggaatgatcatttgctgaagatggtgtcaagtgaacctagattaacagccctccactccagatggatatccagtgattcctagaatgggatatagccagagaacaattctatgcaccctacactgacagactcccttaagcaacaccagatgctctactggtacttgaagtacatgactttgaagtcttgaccctccatgaatacctgaattatcagcaagcgggttttgaagctggtgcctcattgaggccatattagagcaacttgtacatttgacctcttgttatcagccatggtactctacttcgtgtgcaagagataactatgaaagccaaattcaaatactggcaacatttcctaaaggggctcaatatctatcattcgtcttcttttccaaactacacatcactgtatgactcaaccagtagcagttatattgccccttggtttttattcagtttaactactgtttccaagataaatgagctaataagctttaaaaaaaaaaaaaaaaaaggctgaattcttttttcttcatcactggcatatctgcctattctccagaattattatgactattcagctcactttaacagttgaacttcaagcgacaatctttgaacaccccttctcatgtgatttaaaatgaaaccatttggaaaagtttcttctagccagtaatagattttttttttaattgctctgccttgtgccgagagatgttcttttaagatgaatcttttgatgtctgataccaccaaatataggtggtagggagagttggaggctggccctttgagcaggccattagcttacttgctgggcatttccgatagcttattgcctacctttttgctggaaacaaactgatttgaaaaacaaaatctatgaagactgcagctaaggattttatcggtagacttaagagcttttgtccttgtggatattttagtggaaccacatcagtctcaatactgtcattttacactgactcagagcagctgacttcattccttgccatgatatatatttaaggcaggcattgtaacagacataaagacaacttatctgtttcagcaggaaggattcagtttatgaactctcagaccagatcatgttgaacaaggagactttgatgtgtgtcatgagaaaactcattctttacttcccagtcaatttaaaggccagctatcctgagctactcgaatgaatgcactggttaaacattggaaatagtttgtttatatccttgtctctctctaggccaattgtgattacatgactcgactctacatctcgtcaaacaaggcctaggtctggttgctgtagactgctcgccctcaacaaataaaatctggttgactagcctccttgtatatacaactattatttgttaagaagaaattatcgtcaattttctactaccttccaattgtcagctctttttttcctctctggtttttcctatactttacagaaaaagacattgatctatactgccattccctctaatcctgccatactcagtcaaaaggaatgacttaagatgaagatgatcatctgctcgagtctaaaatatacattgtatataagaattggtgattagaaaagcaaaaaacctaaaacttaaatctaggagtctgtatactgtctccatgtctccatgcctcagatctcatctaaatctttgaacagcaccattcaaccaatctgaggccttgacttgcttgtaagatgattctcagagatcggctgagttaaaaaagatgacgacttgattaccaaagaaagtagggccaactttgacaaatctggctctgctgaccctgtcactcccagatgtagcatagactcctaaacagaacctcaagtctgattgaggataaggccttctcctgagctgaaagttctttggcagatgagcaagaaactgaaagctgatgtacctgactggctctgtaagatcagaaaactgtatccagaataagccctatggattaacccctgagtacccagagtaaaaactaatttacagaacttccttattgatctgctggttcttccagatcatattctggctattggtatggctggcctttctgaaggtaccctgcttgtctattttcctgactcagctcttgcctgcctttttcacatgttgctgcaattagactcaccgtgaggactacagtcaatttcagtctatcttgtgcccaatacaacaaggatttttaatagtaacaacccacacctcacccactaggactcaatgttcacaacaggaaggaccattgctgcatactccttgaccagcaacttttttgaagatatttttaagtgcagagtaggcctctattcctgtatgtaattgttcattttcagcacctggaacctcatctatcgggtctggaaggaatacagcagttcgaaagccgcgtccatttctctccttcagtagtgcagaaatgagtccgattcaccagtacacacagaactgtaccagttcaacctagcaaaagaagaaaagtttccactgtacttaaaatttacagctgactcaaattgcctcacagaattatttgatgtagaaggctagttgtcttacttcagatcagcaggacagttgggctctcagactcatgaccactgagtttgcttgtgttgaaactgtggtttcatccaacatatgctattggacatgattattattccattcaaatggattacagacttcttgaggacaggacaaacttatctctcatggtgtttttttagaatacttttataaccaaggaagaaaccatgccagctgttaccattcaacttcttaagcagagattaagctttttcatatctgttcttatcctggacatcagtagtttttaattgcccagcatccgttccatcttgtaacaactccctgatgtttcttaaaaccacctcttcctattttcagtctgtggtttggacagtctgacccaaccttgagctttgtgggtgaacatgtaattcagacctcatcaatcagcaaatccatctgaactgtggaggagaagctctctttactgagggtgctttagctttgtaggatgaaaacctcaaactaacagggcctaccatgtagagaatgaagccagtgcaggggaaagcagagccaaaatatggagagacttgaatcctgatgacagcgtttgtgcccctggatccaaccgtgcctgaagctagaatatcccctggacttttcagttatgtgaaccaataaatacccttttttgcttaagttactttgagttgggtttctgttacttgaaattgaatccacactaatatatctaccaacattgagacttgacagatccaagtatttattaagctagaggtcatggtcactgaaattactttccaaagtggaagacaaaatgaaacaggaactgagggaatatttaagatcccacagaagcgtaaaaatgacatggtagaaagtaatagaaaacctaaatgtctgtcattaaaggataggttaaggtgtggttcagccatataggaatatctcgtatctgttaaaatgaataaagtacattcattgtgtatggaaaaatggccatgatacattaggtgaaacaagttattaatagaaaagtgtacagtgtgaactcattttaaaatgtgtgtgcttatgtttataaatgcatagaaaggtctattcacagctttctttgaacagtgtagatcacatgaaactttcaactttatacatttctgtattaatattttacactacccacattatttttaaactttattttaaataaagaatttttaaaattaaa

SEQ ID NO: 8887 - protein, 65 aa, Homo sapiens; identical to SEQ ID NO: 8885

SEQ ID NO: 8888 - DNA, 4889 bp, Homo sapiens
cacctggaccttctgactaccttccctgtgctattccatcagcctacagacctggtacctggatttttgcccgagatgattcctaccaccttactactgacgaagacacccattccagtggaccactgtgacccaggaggcattcagccatcatgatgtggcctttacctccactcctgtcttgttctacccagattcagcacagccctttatagtgaagtcagagtcctcaagccaaatagctaaagctgttttatcacaacaaaggcctagtttgttccatgagtgtgcatttcatttcttcagttaaagccttcagagacacacaataaatttggaccaggggattttttagttattaatgctctctgaagaaaggcaacatctttttgagagcagcattggaccacaccccacaatctcaaatgattgaaattcatgaacatctaggatcccgtgaaggtcactggaccctgttttttctacttcaaatcctgtagtagcctactgaatgagaaaacatattctgacccattgggatcaaatcaaaggcacagtgaactcctcatagcatcttctttggaattactcaggaaccagaactttttacacaaatgtaagaaattctaccaaggagtccccttacctaacagcatctcacaaggctgcaccagattccagaaaaggcttctcttgatacatcaaggctttgtggccatgaagccctttgagtgaaaactgtgcagaagcccagagtaaaagtgaagctgctctggatgaagtagtgaagcaagagtaggggcctgaatcctgctacaactatcttcctttaccaccgtggtgacacctaaggggacttccttacaacaccttgaactcttccgaacacagtttgaaaaccactgccccagacagcaatatgtttgacctgaatggcattccaatcttttctgtacctccactcagcacagttcatgttcagtagatgctgaacattcttagaaatactgtgtgtgaacttagaaaagtgcaagaagacaggcatgtctttgaccccaggaatgatcatttgctgaagatggtgtcaagtgaacctagattaacagccctccactccagatggatatccagtgattcctagaatgggatatagccagagaacaattctatgcaccctacactgacagactcccttaagcaacaccagatgctctactggtacttgaagtacatgactttgaagtcttgaccctccatgaatacctgaattatcagcaagcgggttttgaagctggtgcctcattgaggccatattagagcaacttgtacatttgacctcttgttatcagccatggtactctacttcgtgtgcaagagataactatgaaagccaaattcaaatactggcaacatttcctaaaggggctcaatatctatcattcgtcttcttttccaaactacacatcactgtatgactcaaccagtagcagttatattgccccttggtttttattcagtttaactactgtttccaagataaatgagctaataagctttaaaaaaaaaaaaaaaaaaggctgaattcttttttcttcatcactggcatatctgcctattctccagaattattatgactattcagctcactttaacagttgaacttcaagcgacaatctttgaacaccccttctcatgtgatttaaaatgaaaccatttggaaaagtttcttctagccagtaatagattttttttttaattgctctgccttgtgccgagagatgttcttttaagatgaatcttttgatgtctgataccaccaaatataggtggtagggagagttggaggctggccctttgagcaggccattagcttacttgctgggcatttccgatagcttattgcctacctttttgctggaaacaaactgatttgaaaaacaaaatctatgaagactgcagctaaggattttatcggtagacttaagagcttttgtccttgtggatattttagtggaaccacatcagtctcaatactgtcattttacactgactcagagcagctgacttcattccttgccatgatatatatttaaggcaggcattgtaacagacataaagacaacttatctgtttcagcaggaaggattcagtttatgaactctcagaccagatcatgttgaacaaggagactttgatgtgtgtcatgagaaaactcattctttacttcccagtcaatttaaaggccagctatcctgagctactcgaatgaatgcactggttaaacattggaaatagtttgtttatatccttgtctctctctaggccaattgtgattacatgactcgactctacatctcgtcaaacaaggcctaggtctggttgctgtagactgctcgccctcaacaaataaaatctggttgactagcctccttgtatatacaactattatttgttaagaagaaattatcgtcaattttctactaccttccaattgtcagctctttttttcctctctggtttttcctatactttacagaaaaagacattgatctatactgccattccctctaatcctgccatactcagtcaaaaggaatgacttaagatgaagatgatcatctgctcgagtctaaaatatacattgtatataagaattggtgattagaaaagcaaaaaacctaaaacttaaatctaggagtctgtatactgtctccatgtctccatgcctcagatctcatctaaatctttgaacagcaccattcaaccaatctgaggccttgacttgcttgtaagatgattctcagagatcggctgagttaaaaaagatgacgacttgattaccaaagaaagtagggccaactttgacaaatctggctctgctgaccctgtcactcccagatgtagcatagactcctaaacagaacctcaagtctgattgaggataaggccttctcctgagctgaaagttctttggcagatgagcaagaaactgaaagctgatgtacctgactggctctgtaagatcagaaaactgtatccagaataagccctatggattaacccctgagtacccagagtaaaaactaatttacagaacttccttattgatctgctggttcttccagatcatattctggctattggtatggctggcctttctgaaggtaccctgcttgtctattttcctgactcagctcttgcctgcctttttcacatgttgctgcaattagactcaccgtgaggactacagtcaatttcagtctatcttgtgcccaatacaacaaggatttttaatagtaacaacccacacctcacccactaggactcaatgttcacaacaggaaggaccattgctgcatactccttgaccagcaacttttttgaagatatttttaagtgcagagtaggcctctattcctgtatgtaattgttcattttcagcacctggaacctcatctatcgggtctggaaggaatacagcagttcgaaagccgcgtccatttctctccttcagtagtgcagaaatgagtccgattcaccagtacacacagaactgtaccagttcaacctagcaaaagaagaaaagtttccactgtacttaaaatttacagctgactcaaattgcctcacagaattatttgatgtagaaggctagttgtcttacttcagatcagcaggacagttgggctctcagactcatgaccactgagtttgcttgtgttgaaactgtggtttcatccaacatatgctattggacatgattattattccattcaaatggattacagacttcttgaggacaggacaaacttatctctcatggtgtttttttagaatacttttataaccaaggaagaaaccatgccagctgttaccattcaacttcttaagcagagattaagctttttcatatctgttcttatcctggacatcagtagtttttaattgcccagcatccgttccatcttgtaacaactccctgatgtttcttaaaaccacctcttcctattttcagtctgtggtttggacagtctgacccaaccttgagctttgtgggtgaacatgtaattcagacctcatcaatcagcaaatccatctgaactgtggaggagaagctctctttactgagggtgctttagctttgtaggatgaaaacctcaaactaacagggcctaccatgtagagaatgaagccagtgcaggggaaagcagagccaaaatatggagagacttgaatcctgatgacagcgtttgtgcccctggatccaaccgtgcctgaagctagaatatcccctggacttttcagttatgtgaaccaataaatacccttttttgcttaagttactttgagttgggtttctgttacttgaaattgaatccacactaatatatctaccaacattgagacttgacagatccaagtatttattaagctagaggtcatggtcactgaaattactttccaaagtggaagacaaaatgaaacaggaactgagggaatatttaagatcccacagaagcgtaaaaatgacatggtagaaagtaatagaaaacctaaatgtctgtcattaaaggataggttaaggtgtggttcagccatataggaatatctcgtatctgttaaaatgaataaagtacattcattgtgtatggaaaaatggccatgatacattaggtgaaacaagttattaatagaaaagtgtacagtgtgaactcattttaaaatgtgtgtgcttatgtttataaatgcatagaaaggtctattcacagctttctttgaacagtgtagatcacatgaaactttcaactttatacatttctgtattaatattttacactacccacattatttttaaactttattttaaataaagaatttttaaaattaaa

SEQ ID NO: 8889 - protein, 65 aa, Homo sapiens; identical to SEQ ID NO: 8885

SEQ ID NO: 8890 - DNA, 4342 bp, Homo sapiens
cacctggaccttctgactaccttccctgtgctattccatcagcctacagacctggtacctggatttttgcccgagatgattcctaccaccttactactgacgaagacacccattccagtggaccactgtgacccaggaggcattcagccatcatgatgtggcctttacctccactcctgtcttgttctacccagattcagcacagccctttatagtgaagtcagagtcctcaagccaaatagctaaagctgttttatcacaacaaaggcctagtttgttccatgagtgtgcatttcatttcttcagttaaagccttcagagacacacaataaatttggaccaggggattttttagttattaatgctctctgaagaaaggcaacatctttttgagagcagcattggaccacaccccacaatctcaaatgattgaaattcatgaacatctaggatcccgtgaaggtcactggaccctgttttttctacttcaaatcctgtagtagcctactgaatgagaaaacatattctgacccattgggatcaaatcaaaggcacagtgaactcctcatagcatcttctttggaattactcaggaaccagaactttttacacaaatgtaagaaattctaccaaggagtccccttacctaacagcatctcacaaggctgcaccagattccagaaaaggcttctcttgatacatcaaggctttgtggccatgaagccctttgagtgaaaactgtgcagaagcccagagtaaaagtgaagctgctctggatgaagtagtgaagcaagagtaggggcctgaatcctgctacaactatcttcctttaccaccgtggtgacacctaaggggacttccttacaacaccttgaactcttccgaacacagtttgaaaaccactgccccagacagcaatatgtttgacctgaatggcattccaatcttttctgtacctccactcagcacagttcatgttcagtagatgctgaacattcttagaaatactgtgtgtgaacttagaaaagtgcaagaagacaggcatgtctttgaccccaggaatgatcatttgctgaagatggtgtcaagtgaacctagattaacagccctccactccagatggatatccagtgattcctagaatgggatatagccagagaacaattctatgcaccctacactgacagactcccttaagcaacaccagatgctctactggtacttgaagtacatgactttgaagtcttgaccctccatgaatacctgaattatcagcaagcgggttttgaagctggtgcctcattgaggccatattagagcaacttgtacatttgacctcttgttatcagccatggtactctacttcgtgtgcaagagataactatgaaagccaaattcaaatactggcaacatttcctaaaggggctcaatatctatcattcgtcttcttttccaaactacacatcactgtatgactcaaccagtagcagttatattgccccttggtttttattcagtttaactactgtttccaagataaatgagctaataagctttaaaaaaaaaaaaaaaaaaggctgaattcttttttcttcatcactggcatatctgcctattctccagaattattatgactattcagctcactttaacagttgaacttcaagcgacaatctttgaacaccccttctcatgtgatttaaaatgaaaccatttggaaaagtttcttctagccagtaatagattttttttttaattgctctgccttgtgccgagagatgttcttttaagatgaatcttttgatgtctgataccaccaaatataggtggtagggagagttggaggctggccctttgagcaggccattagcttacttgctgggcatttccgatagcttattgcctacctttttgctggaaacaaactgatttgaaaaacaaaatctatgaagactgcagctaaggattttatcggtagacttaagagcttttgtccttgtggatattttagtggaaccacatcagtctcaatactgtcattttacactgactcagagcagctgacttcattccttgccatgatatatatttaaggcaggcattgtaacagacataaagacaacttatctgtttcagcaggaaggattcagtttatgaactctcagaccagatcatgttgaacaaggagactttgatgtgtgtcatgagaaaactcattctttacttcccagtcaatttaaaggccagctatcctgagctactcgaatgaatgcactggttaaacattggaaatagtttgtttatatccttgtctctctctaggccaattgtgattacatgactcgactctacatctcgtcaaacaaggcctaggtctggttgctgtagactgctcgccctcaacaaataaaatctggttgactagcctccttgtatatacaactattatttgttaagaagaaattatcgtcaattttctactaccttccaattgtcagctctttttttcctctctggtttttcctatactttacagaaaaagacattgatctatactgccattccctctaatcctgccatactcagtcaaaaggaatgacttaagatgaagatgatcatctgctcgagtctaaaatatacattgtatataagaattggtgattagaaaagcaaaaaacctaaaacttaaatctaggagtctgtatactgtctccatgtctccatgcctcagatctcatctaaatctttgaacagcaccattcaaccaatctgaggccttgacttgcttgtaagatgattctcagagatcggctgagttaaaaaagatgacgacttgattaccaaagaaagtagggccaactttgacaaatctggctctgctgaccctgtcactcccagatgtagcatagactcctaaacagaacctcaagtctgattgaggataaggccttctcctgagctgaaagttctttggcagatgagcaagaaactgaaagctgatgtacctgactggctctgtaagatcagaaaactgtatccagaataagccctatggattaacccctgagtacccagagtaaaaactaatttacagaacttccttattgatctgctggttcttccagatcatattctggctattggtatggctggcctttctgaaggtaccctgcttgtctattttcctgactcagctcttgcctgcctttttcacatgttgctgcaattagactcaccgtgaggactacagtcaatttcagtctatcttgtgcccaatacaacaaggatttttaatagtaacaacccacacctcacccactaggactcaatgttcacaacaggaaggaccattgctgcatactccttgaccagcaacttttttgaagatatttttaagtgcagagtaggcctctattcctgtatgtaattgttcattttcagcacctggaacctcatctatcgggtctggaaggaatacagcagttcgaaagccgcgtccatttctctccttcagtagtgcagaaatgagtccgattcaccagtacacacagaactgtaccagttcaacctagcaaaagaagaaaagtttccactgtacttaaaatttacagctgactcaaattgcctcacagaattatttgatgtagaaggctagttgtcttacttcagatcagcaggacagttgggctctcagactcatgaccactgagtttgcttgtgttgaaactgtggtttcatccaacatatgctattggacatgattattattccattcaaatggattacagacttcttgaggacaggacaaacttatctctcatggtgtttttttagaatacttttataaccaaggaagaaaccatgccagctgttaccattcaacttcttaagcagagattaagctttttcatatctgttcttatcctggacatcagtagtttttaattgcccagcatccgttccatcttgtaacaactccctgatgtttcttaaaaccacctcttcctattttcagtctgtggtttggacagtctgacccaaccttgagctttgtgggtgaacatgtaattcagacctcatcaatcagcaaatccatctgaactgtggaggagaagctctctttactgagggtgctttagctttgtaggatgaaaacctcaaactaacagggcctaccatgtagagaatgaagccagtgcaggggaaagcagagccaaaatatggagagacttgaatcctgatgacagcgtttgtgcccctggatccaaccgtgcctgaagctagaatatcccctggacttttcagttatgtgaaccaataaatacccttttttgcttaagtt

SEQ ID NO: 8891 - protein, 65 aa, Homo sapiens; identical to SEQ ID NO: 8885

SEQ ID NO: 8892 - DNA, 2553 bp, Homo sapiens
aactcttccgaacacagtttgaaaaccactgccccagacagcaatatgtttgacctgaatggcattccaatcttttctgtacctccactcagcacagttcatgttcagtagatgctgaacattcttagaaatactgtgtgtgaacttagaaaagtgcaagaagacaggcatgtctttgaccccaggaatgatcatttgctgaagatggtgtcaagtgaacctagattaacagccctccactccagatggatatccagtgattcctagaatgggatatagccagagaacaattctatgcaccctacactgacagactcccttaagcaacaccagatgctctactggtacttgaagtacatgactttgaagtcttgaccctccatgaatacctgaattatcagcaagcgggttttgaagctggtgcctcattgaggccatattagagcaacttgtacatttgacctcttgttatcagccatggtactctacttcgtgtgcaagagataactatgaaagccaaattcaaatactggcaacatttcctaaaggggctcaatatctatcattcgtcttcttttccaaactacacatcactgtatgactcaaccagtagcagttatattgccccttggtttttattcagtttaactactgtttccaagataaatgagctaataagctttaaaaaaaaaaaaaaaaaaggctgaattcttttttcttcatcactggcatatctgcctattctccagaattattatgactattcagctcactttaacagttgaacttcaagcgacaatctttgaacaccccttctcatgtgatttaaaatgaaaccatttggaaaagtttcttctagccagtaatagattttttttttaattgctctgccttgtgccgagagatgagtctgtatactgtctccatgtctccatgcctcagatctcatctaaatctttgaacagcaccattcaaccaatctgaggccttgacttgcttgtaagatgattctcagagatcggctgagttaaaaaagatgacgacttgattaccaaagaaagtagggccaactttgacaaatctggctctgctgaccctgtcactcccagatgtagcatagactcctaaacagaacctcaagtctgattgaggataaggccttctcctgagctgaaagttctttggcagatgagcaagaaactgaaagctgatgtacctgactggctctgtaagatcagaaaactgtatccagaataagccctatggattaacccctgagtacccagagtaaaaactaatttacagaacttccttattgatctgctggttcttccagatcatattctggctattggtatggctggcctttctgaaggtaccctgcttgtctattttcctgactcagctcttgcctgcctttttcacatgttgctgcaattagactcaccgtgaggactacagtcaatttcagtctatcttgtgcccaatacaacaaggatttttaatagtaacaacccacacctcacccactaggactcaatgttcacaacaggaaggaccattgctgcatactccttgaccagcaacttttttgaagatatttttaagtgcagagtaggcctctattcctgtatgtaattgttcattttcagcacctggaacctcatctatcgggtctggaaggaatacagcagttcgaaagccgcgtccatttctctccttcagtagtgcagaaatgagtccgattcaccagtacacacagaactgtaccagttcaacctagcaaaagaagaaaagtttccactgtacttaaaatttacagctgactcaaattgcctcacagaattatttgatgtagaaggctagttgtcttacttcagatcagcaggacagttgggctctcagactcatgaccactgagtttgcttgtgttgaaactgtggtttcatccaacatatgctattggacatgattattattccattcaaatggattacagacttcttgaggacaggacaaacttatctctcatggtgtttttttagaatacttttataaccaaggaagaaaccatgccagctgttaccattcaacttcttaagcagagattaagctttttcatatctgttcttatcctggacatcagtagtttttaattgcccagcatccgttccatcttgtaacaactccctgatgtttcttaaaaccacctcttcctattttcagtctgtggtttggacagtctgacccaaccttgagctttgtgggtgaacatgtaattcagacctcatcaatcagcaaatccatctgaactgtggaggagaagctctctttactgagggtgctttagctttgtaggatgaaaacctcaaactaacagggcctaccatgtagagaatgaagccagtgcaggggaaagcagagccaaaatatggagagacttgaatcctgatgacagcgtttgtgcccctggatccaaccgtgcctgaagctagaatatcccctggacttttcagttatgtgaaccaataaatacccttttttgcttaagtt

SEQ ID NO: 8893 - protein, 65 aa, Homo sapiens; identical to SEQ ID NO: 8885

SEQ ID NO: 8894 - DNA, 3100 bp, Homo sapiens
aactcttccgaacacagtttgaaaaccactgccccagacagcaatatgtttgacctgaatggcattccaatcttttctgtacctccactcagcacagttcatgttcagtagatgctgaacattcttagaaatactgtgtgtgaacttagaaaagtgcaagaagacaggcatgtctttgaccccaggaatgatcatttgctgaagatggtgtcaagtgaacctagattaacagccctccactccagatggatatccagtgattcctagaatgggatatagccagagaacaattctatgcaccctacactgacagactcccttaagcaacaccagatgctctactggtacttgaagtacatgactttgaagtcttgaccctccatgaatacctgaattatcagcaagcgggttttgaagctggtgcctcattgaggccatattagagcaacttgtacatttgacctcttgttatcagccatggtactctacttcgtgtgcaagagataactatgaaagccaaattcaaatactggcaacatttcctaaaggggctcaatatctatcattcgtcttcttttccaaactacacatcactgtatgactcaaccagtagcagttatattgccccttggtttttattcagtttaactactgtttccaagataaatgagctaataagctttaaaaaaaaaaaaaaaaaaggctgaattcttttttcttcatcactggcatatctgcctattctccagaattattatgactattcagctcactttaacagttgaacttcaagcgacaatctttgaacaccccttctcatgtgatttaaaatgaaaccatttggaaaagtttcttctagccagtaatagattttttttttaattgctctgccttgtgccgagagatgagtctgtatactgtctccatgtctccatgcctcagatctcatctaaatctttgaacagcaccattcaaccaatctgaggccttgacttgcttgtaagatgattctcagagatcggctgagttaaaaaagatgacgacttgattaccaaagaaagtagggccaactttgacaaatctggctctgctgaccctgtcactcccagatgtagcatagactcctaaacagaacctcaagtctgattgaggataaggccttctcctgagctgaaagttctttggcagatgagcaagaaactgaaagctgatgtacctgactggctctgtaagatcagaaaactgtatccagaataagccctatggattaacccctgagtacccagagtaaaaactaatttacagaacttccttattgatctgctggttcttccagatcatattctggctattggtatggctggcctttctgaaggtaccctgcttgtctattttcctgactcagctcttgcctgcctttttcacatgttgctgcaattagactcaccgtgaggactacagtcaatttcagtctatcttgtgcccaatacaacaaggatttttaatagtaacaacccacacctcacccactaggactcaatgttcacaacaggaaggaccattgctgcatactccttgaccagcaacttttttgaagatatttttaagtgcagagtaggcctctattcctgtatgtaattgttcattttcagcacctggaacctcatctatcgggtctggaaggaatacagcagttcgaaagccgcgtccatttctctccttcagtagtgcagaaatgagtccgattcaccagtacacacagaactgtaccagttcaacctagcaaaagaagaaaagtttccactgtacttaaaatttacagctgactcaaattgcctcacagaattatttgatgtagaaggctagttgtcttacttcagatcagcaggacagttgggctctcagactcatgaccactgagtttgcttgtgttgaaactgtggtttcatccaacatatgctattggacatgattattattccattcaaatggattacagacttcttgaggacaggacaaacttatctctcatggtgtttttttagaatacttttataaccaaggaagaaaccatgccagctgttaccattcaacttcttaagcagagattaagctttttcatatctgttcttatcctggacatcagtagtttttaattgcccagcatccgttccatcttgtaacaactccctgatgtttcttaaaaccacctcttcctattttcagtctgtggtttggacagtctgacccaaccttgagctttgtgggtgaacatgtaattcagacctcatcaatcagcaaatccatctgaactgtggaggagaagctctctttactgagggtgctttagctttgtaggatgaaaacctcaaactaacagggcctaccatgtagagaatgaagccagtgcaggggaaagcagagccaaaatatggagagacttgaatcctgatgacagcgtttgtgcccctggatccaaccgtgcctgaagctagaatatcccctggacttttcagttatgtgaaccaataaatacccttttttgcttaagttactttgagttgggtttctgttacttgaaattgaatccacactaatatatctaccaacattgagacttgacagatccaagtatttattaagctagaggtcatggtcactgaaattactttccaaagtggaagacaaaatgaaacaggaactgagggaatatttaagatcccacagaagcgtaaaaatgacatggtagaaagtaatagaaaacctaaatgtctgtcattaaaggataggttaaggtgtggttcagccatataggaatatctcgtatctgttaaaatgaataaagtacattcattgtgtatggaaaaatggccatgatacattaggtgaaacaagttattaatagaaaagtgtacagtgtgaactcattttaaaatgtgtgtgcttatgtttataaatgcatagaaaggtctattcacagctttctttgaacagtgtagatcacatgaaactttcaactttatacatttctgtattaatattttacactacccacattatttttaaactttattttaaataaagaatttttaaaattaaa

SEQ ID NO: 8895 - protein, 65 aa, Homo sapiens; identical to SEQ ID NO: 8885

SEQ ID NO: 8896 - DNA, 1501 bp, Homo sapiens
ggcatatctgcctattctccagaattattatgactattcagctcactttaacagttgaacttcaagcgacaatctttgaacaccccttctcatgtgatttaaaatgaaaccatttggaaaagtttcttctagccagtaatagattttttttttaattgctctgccttgtgccgagagatgttcttttaagatgaatcttttgatgtctgataccaccaaatataggtggtagggagagttggaggctggccctttgagcaggccattagcttacttgctgggcatttccgatagcttattgcctacctttttgctggaaacaaactgatttgaaaaacaaaatctatgaagactgcagctaaggattttatcggtagacttaagagcttttgtccttgtggatattttagtggaaccacatcagtctcaatactgtcattttacactgactcagagcagctgacttcattccttgccatgatatatatttaaggcaggcattgtaacagacataaagacaacttatctgtttcagcaggaaggattcagtttatgaactctcagaccagatcatgttgaacaaggagactttgatgtgtgtcatgagaaaactcattctttacttcccagtcaatttaaaggccagctatcctgagctactcgaatgaatgcactggttaaacattggaaatagtttgtttatatccttgtctctctctaggccaattgtgattacatgactcgactctacatctcgtcaaacaaggcctaggtctggttgctgtagactgctcgccctcaacaaataaaatctggttgactaagccaaaatatggagagacttgaatcctgatgacagcgtttgtgcccctggatccaaccgtgcctgaagctagaatatcccctggacttttcagttatgtgaaccaataaatacccttttttgcttaagttactttgagttgggtttctgttacttgaaattgaatccacactaatatatctaccaacattgagacttgacagatccaagtatttattaagctagaggtcatggtcactgaaattactttccaaagtggaagacaaaatgaaacaggaactgagggaatatttaagatcccacagaagcgtaaaaatgacatggtagaaagtaatagaaaacctaaatgtctgtcattaaaggataggttaaggtgtggttcagccatataggaatatctcgtatctgttaaaatgaataaagtacattcattgtgtatggaaaaatggccatgatacattaggtgaaacaagttattaatagaaaagtgtacagtgtgaactcattttaaaatgtgtgtgcttatgtttataaatgcatagaaaggtctattcacagctttctttgaacagtgtagatcacatgaaactttcaactttatacatttctgtattaatattttacactacccacattatttttaaactttattttaaataaagaatttttaaaattaaa

SEQ ID NO: 8897 - protein, 53 aa, Homo sapiens [sequence omitted]

SEQ ID NO: 8898 - DNA, 1930 bp, Homo sapiens
gagatgttcttttaagatgaatcttttgatgtctgataccaccaaatataggtggtagggagagttggaggctggccctttgagcaggccattagcttacttgctgggcatttccgatagcttattgcctacctttttgctggaaacaaactgatttgaaaaacaaaatctatgaagactgcagctaaggattttatcggtagacttaagagcttttgtccttgtggatattttagtggaaccacatcagtctcaatactgtcattttacactgactcagagcagctgacttcattccttgccatgatatatatttaaggcaggcattgtaacagacataaagacaacttatctgtttcagcaggaaggattcagtttatgaactctcagaccagatcatgttgaacaaggagactttgatgtgtgtcatgagaaaactcattctttacttcccagtcaatttaaaggccagctatcctgagctactcgaatgaatgcactggttaaacattggaaatagtttgtttatatccttgtctctctctaggccaattgtgattacatgactcgactctacatctcgtcaaacaaggcctaggtctggttgctgtagactgctcgccctcaacaaataaaatctggttgactagcctccttgtatatacaactattatttgttaagaagaaattatcgtcaattttctactaccttccaattgtcagctctttttttcctctctggtttttcctatactttacagaaaaagacattgatctatactgccattccctctaatcctgccatactcagtcaaaaggaatgacttaagatgaagatgatcatctgctcgagtctaaaatatacattgtatataagaattggtgattagaaaagcaaaaaacctaaaacttaaatctaggagtctgtatactgtctccatgtctccatgcctcagatctcatctaaatctttgaacagcaccattcaaccaatctgaggccttgacttgcttgtaagatgattctcagagatcggctgagttaaaaaagatgacgacttgattaccaaagaaagtagggccaactttgacaaatctggctctgctgaccctgtcactcccagatgtacaaatccatctgaactgtggaggagaagctctctttactgagggtgctttagctttgtaggatgaaaacctcaaactaacagggcctaccatgtagagaatgaagccagtgcaggggaaagcagagccaaaatatggagagacttgaatcctgatgacagcgtttgtgcccctggatccaaccgtgcctgaagctagaatatcccctggacttttcagttatgtgaaccaataaatacccttttttgcttaagttactttgagttgggtttctgttacttgaaattgaatccacactaatatatctaccaacattgagacttgacagatccaagtatttattaagctagaggtcatggtcactgaaattactttccaaagtggaagacaaaatgaaacaggaactgagggaatatttaagatcccacagaagcgtaaaaatgacatggtagaaagtaatagaaaacctaaatgtctgtcattaaaggataggttaaggtgtggttcagccatataggaatatctcgtatctgttaaaatgaataaagtacattcattgtgtatggaaaaatggccatgatacattaggtgaaacaagttattaatagaaaagtgtacagtgtgaactcattttaaaatgtgtgtgcttatgtttataaatgcatagaaaggtctattcacagctttctttgaacagtgtagatcacatgaaactttcaactttatacatttctgtattaatattttacactacccacattatttttaaactttattttaaataaagaatttttaaaattaaa

SEQ ID NO: 8899 - protein, 53 aa, Homo sapiens [sequence omitted]

SEQ ID NO: 8900 - DNA, 2254 bp, Homo sapiens
agtggaaccacatcagtctcaatactgtcattttacactgactcagagcagctgacttcattccttgccatgatatatatttaaggcaggcattgtaacagacataaagacaacttatctgtttcagcaggaaggattcagtttatgaactctcagaccagatcatgttgaacaaggagactttgatgtgtgtcatgagaaaactcattctttacttcccagtcaatttaaaggccagctatcctgagctactcgaatgaatgcactggttaaacattggaaatagtttgtttatatccttgtctctctctaggccaattgtgattacatgactcgactctacatctcgtcaaacaaggcctaggtctggttgctgtagactgctcgccctcaacaaataaaatctggttgactagcctccttgtatatacaactattatttgttaagaagaaattatcgtcaattttctactaccttccaattgtcagctctttttttcctctctggtttttcctatactttacagaaaaagacattgatctatactgccattccctctaatcctgccatactcagtcaaaaggaatgacttaagatgaagatgatcatctgctcgagtctaaaatatacattgtatataagaattggtgattagaaaagcaaaaaacctaaaacttaaatctaggagtctgtatactgtctccatgtctccatgcctcagatctcatctaaatctttgaacagcaccattcaaccaatctgaggccttgacttgcttgtaagatgattctcagagatcggctgagttaaaaaagatgacgacttgattaccaaagaaagtagggccaactttgacaaatctggctctgctgaccctgtcactcccagatgtagcatagactcctaaacagaacctcaagtctgattgaggataaggccttctcctgagctgaaagttctttggcagatgagcaagaaactgaaagctgatgtacctgactggctctgtaagatcagaaaactgtatccagaataagccctatggattaacccctgagtacccagagtaaaaactaatttacagaacttccttattgatctgctggttcttccagatcatattctggctattggtatggctggcctttctgaaggtaccctgcttgtctattttcctgactcagctcttgcctgcctttttcacatgttgctgcaattagactcacccactaggactcaatgttcacaacaggaaggaccattgctgcatactccttgaccagcaacttttttgaagatatttttaagtgcagagtaggcctctattcctgtatgtaattgttcattttcagcacctggaacctcatctatcgggtctggaaggaatacagcagttcgaaagccgcgtccatttctctccttcagtagtgcagaaatgagtccgattcaccagtacacacagaactgtaccagttcaacctagcaaaagaagaaaagtttccactgtacttaaaatttacagctgactcaaattgcctcacagaattatttgatgtagaaggctagttgtcttacttcagatcagcaggacagttgggctctcagactcatgaccactgagtttgcttgtgttgaaactgtggtttcatccaacatatgctattggacatgattattattccattcaaatggattacagacttcttgaggacaggacaaacttatctctcatggtgtttttttagaatacttttataaccaaggaagaaaccatgccagctgttaccattcaacttcttaagcagagattaagctttttcatatctgttcttatcctggacatcagtagtttttaattgcccagcatccgttccatcttgtaacaactccctgatgtttcttaaaaccacctcttcctattttcagtctgtggtttggacagtctgacccaaccttgagctttgtgggtgaacatgtaattcagacctcatcaatcagcaaatccatctgaactgtggaggagaagctctctttactgagggtgctttagctttgtaggatgaaaacctcaaactaacagggcctaccatgtagagaatgaagccagtgcaggggaaagcagagccaaaatatggagagacttgaatcctgatgacagcgtttgtgcccctggatccaaccgtgcctgaagctagaatatcccctggacttttcagttatgtgaaccaataaatacccttttttgcttaagtt

SEQ ID NO: 8901 - protein, 47 aa, Homo sapiens
MAGLSEGTLLVYFPDSALACLFHMLLQLDSPTRTQCSQQEGPLLHTP

SEQ ID NO: 8902 - DNA, 2801 bp, Homo sapiens
agtggaaccacatcagtctcaatactgtcattttacactgactcagagcagctgacttcattccttgccatgatatatatttaaggcaggcattgtaacagacataaagacaacttatctgtttcagcaggaaggattcagtttatgaactctcagaccagatcatgttgaacaaggagactttgatgtgtgtcatgagaaaactcattctttacttcccagtcaatttaaaggccagctatcctgagctactcgaatgaatgcactggttaaacattggaaatagtttgtttatatccttgtctctctctaggccaattgtgattacatgactcgactctacatctcgtcaaacaaggcctaggtctggttgctgtagactgctcgccctcaacaaataaaatctggttgactagcctccttgtatatacaactattatttgttaagaagaaattatcgtcaattttctactaccttccaattgtcagctctttttttcctctctggtttttcctatactttacagaaaaagacattgatctatactgccattccctctaatcctgccatactcagtcaaaaggaatgacttaagatgaagatgatcatctgctcgagtctaaaatatacattgtatataagaattggtgattagaaaagcaaaaaacctaaaacttaaatctaggagtctgtatactgtctccatgtctccatgcctcagatctcatctaaatctttgaacagcaccattcaaccaatctgaggccttgacttgcttgtaagatgattctcagagatcggctgagttaaaaaagatgacgacttgattaccaaagaaagtagggccaactttgacaaatctggctctgctgaccctgtcactcccagatgtagcatagactcctaaacagaacctcaagtctgattgaggataaggccttctcctgagctgaaagttctttggcagatgagcaagaaactgaaagctgatgtacctgactggctctgtaagatcagaaaactgtatccagaataagccctatggattaacccctgagtacccagagtaaaaactaatttacagaacttccttattgatctgctggttcttccagatcatattctggctattggtatggctggcctttctgaaggtaccctgcttgtctattttcctgactcagctcttgcctgcctttttcacatgttgctgcaattagactcacccactaggactcaatgttcacaacaggaaggaccattgctgcatactccttgaccagcaacttttttgaagatatttttaagtgcagagtaggcctctattcctgtatgtaattgttcattttcagcacctggaacctcatctatcgggtctggaaggaatacagcagttcgaaagccgcgtccatttctctccttcagtagtgcagaaatgagtccgattcaccagtacacacagaactgtaccagttcaacctagcaaaagaagaaaagtttccactgtacttaaaatttacagctgactcaaattgcctcacagaattatttgatgtagaaggctagttgtcttacttcagatcagcaggacagttgggctctcagactcatgaccactgagtttgcttgtgttgaaactgtggtttcatccaacatatgctattggacatgattattattccattcaaatggattacagacttcttgaggacaggacaaacttatctctcatggtgtttttttagaatacttttataaccaaggaagaaaccatgccagctgttaccattcaacttcttaagcagagattaagctttttcatatctgttcttatcctggacatcagtagtttttaattgcccagcatccgttccatcttgtaacaactccctgatgtttcttaaaaccacctcttcctattttcagtctgtggtttggacagtctgacccaaccttgagctttgtgggtgaacatgtaattcagacctcatcaatcagcaaatccatctgaactgtggaggagaagctctctttactgagggtgctttagctttgtaggatgaaaacctcaaactaacagggcctaccatgtagagaatgaagccagtgcaggggaaagcagagccaaaatatggagagacttgaatcctgatgacagcgtttgtgcccctggatccaaccgtgcctgaagctagaatatcccctggacttttcagttatgtgaaccaataaatacccttttttgcttaagttactttgagttgggtttctgttacttgaaattgaatccacactaatatatctaccaacattgagacttgacagatccaagtatttattaagctagaggtcatggtcactgaaattactttccaaagtggaagacaaaatgaaacaggaactgagggaatatttaagatcccacagaagcgtaaaaatgacatggtagaaagtaatagaaaacctaaatgtctgtcattaaaggataggttaaggtgtggttcagccatataggaatatctcgtatctgttaaaatgaataaagtacattcattgtgtatggaaaaatggccatgatacattaggtgaaacaagttattaatagaaaagtgtacagtgtgaactcattttaaaatgtgtgtgcttatgtttataaatgcatagaaaggtctattcacagctttctttgaacagtgtagatcacatgaaactttcaactttatacatttctgtattaatattttacactacccacattatttttaaactttattttaaataaagaatttttaaaattaaa

SEQ ID NO: 8903 - protein, 47 aa, Homo sapiens; identical to SEQ ID NO: 8901

SEQ ID NO: 8904 - DNA, 1815 bp, Homo sapiens
ctcatctaaatctttgaacagcaccattcaaccaatctgaggccttgacttgcttgtaagatgattctcagagatcggctgagttaaaaaagatgacgacttgattaccaaagaaagtagggccaactttgacaaatctggctctgctgaccctgtcactcccagatgtagcatagactcctaaacagaacctcaagtctgattgaggataaggccttctcctgagctgaaagttctttggcagatgagcaagaaactgaaagctgatgtacctgactggctctgtaagatcagaaaactgtatccagaataagccctatggattaacccctgagtacccagagtaaaaactaatttacagaacttccttattgatctgctggttcttccagatcatattctggctattggtatggctggcctttctgaaggtaccctgcttgtctattttcctgactcagctcttgcctgcctttttcacatgttgctgcaattagactcaccgtgaggactacagtcaatttcagtctatcttgtgcccaatacaacaaggatttttaatagtaacaacccacacctcacccactaggactcaatgttcacaacaggaaggaccattgctgcatactccttgaccagcaacttttttgaagatatttttaagtgcagagtaggcctctattcctgtatgtaattgttcattttcagcacctggaacctcatctatcgggtctggaaggaatacagcagttcgaaagccgcgtccatttctctccttcagtagtgcagaaatgagtccgattcaccagtacacacagaactgtaccagttcaacctagcaaaagaagaaaagtttccactgtacttaaaatttacagctgactcaaattgcctcacagaattatttgatgtttcttaaaaccacctcttcctattttcagtctgtggtttggacagtctgacccaaccttgagctttgtgggtgaacatgtaattcagacctcatcaatcagcaaatccatctgaactgtggaggagaagctctctttactgagggtgctttagctttgtaggatgaaaacctcaaactaacagggcctaccatgtagagaatgaagccagtgcaggggaaagcagagccaaaatatggagagacttgaatcctgatgacagcgtttgtgcccctggatccaaccgtgcctgaagctagaatatcccctggacttttcagttatgtgaaccaataaatacccttttttgcttaagttactttgagttgggtttctgttacttgaaattgaatccacactaatatatctaccaacattgagacttgacagatccaagtatttattaagctagaggtcatggtcactgaaattactttccaaagtggaagacaaaatgaaacaggaactgagggaatatttaagatcccacagaagcgtaaaaatgacatggtagaaagtaatagaaaacctaaatgtctgtcattaaaggataggttaaggtgtggttcagccatataggaatatctcgtatctgttaaaatgaataaagtacattcattgtgtatggaaaaatggccatgatacattaggtgaaacaagttattaatagaaaagtgtacagtgtgaactcattttaaaatgtgtgtgcttatgtttataaatgcatagaaaggtctattcacagctttctttgaacagtgtagatcacatgaaactttcaactttatacatttctgtattaatattttacactacccacattatttttaaactttattttaaataaagaatttttaaaattaaa

SEQ ID NO: 8905 - protein, 53 aa, Homo sapiens [sequence omitted]

SEQ ID NO: 8906 - DNA, 815 bp, Homo sapiens
aagagaagagttttgctcctcataggtaagctttaactctcaacctgctcttactcaaactataacaatttgcattaattcaagttctataacccagttctaccatttttccaaagtataacaatttgcattaattcaagttctataacccagttctaccatttttctgttgggcaccgtagcactcactgcagaaaatcccttccatcttgaacattttccaactttgaccctttctttccattccctttccgtgaaacaggcgtgacttcttaatcctgtattgacatggaatgatactctagtcatcttggcttgatctagtgtgcctcattgtcctgatcagaaaaatcagaaactttgggggacctgaaacatcatctctctggacttgttgcaaaggctggagtgcaatgacgtgatctcggctcactgcaacctccacctcctgggttcaagcaattcttctgtctcagcctcctgagtagctggcattacaggcgcctgccaccatgcctggctaatttttgtatttttagtagagacggggtttcaccatgttggccaggctggtctcgaactcctaacctcaggtgatccgcccgcctcagcctcccaaagtgctgggattacaggcgtgagccaccatgcccggcattaagtctctatttcttagattctcttttgaatccagcttccagcctctgcaaagttccttttattattgctgacaaagataatatgagtccatacaatttataactaccttccacagttggaccttagtcctctacaattagaaccatgtttagagt

SEQ ID NO: 8907 - protein, 36 aa, Homo sapiens
NIISLDLLQRLECNDVISAHCNLHLLGSSNSSVSAS

SEQ ID NO: 8908 - DNA, 550 bp, Homo sapiens
aagagaagagttttgctcctcataggtaagctttaactctcaacctgctcttactcaaactataacaatttgcattaattcaagttctataacccagttctaccatttttccaaagtataacaatttgcattaattcaagttctataacccagttctaccatttttctgttgggcaccgtagcactcactgcagaaaatcccttccatcttgaacattttccaactttgaccctttctttccattccctttccgtgaaacaggcgtgacttcttaatcctgtattgacatggaatgatactctagtcatcttggcttgatctagtgtgcctcattgtcctgatcagaaaaatcagaaactttgggggacctgaaacatcatctctctggacttgttgcaaagatggaaggtaacaccctggagatggtagagcattgagacgagaagagtgtgggtcattgaagacttcatgaaacacagcagccacacaccagctctggactgccccaccctgactttgacattagagaagtaaacttcattttcttga

SEQ ID NO: 8909 - protein, 35 aa, Homo sapiens
SSWLDLVCLIVLIRKIRNFGGPETSSLWTCCKDGR

SEQ ID NO: 8910 - DNA, 4474 bp, Homo sapiens
ttaaatatttgcttcctgaaaagatttggtgctttatagtcagttttttgagttactaggtcctcagagattttggggagtagatgcaggaggagagaacgttatcaggaaacaacagacaagctcaacaatttcagcagcatctaagagcatgaaatattagctattatttttatgctggaaggaaaataggaaacttaaaaggagtagattgtagaatccatgcctacaggtaactgagtaagtgcccaagtaaatgaggcatagtgagtgcctataaattcagaaaagagagattaacatggaattaccgtgaatatgtttatagaaaaaagtaaatttgaaataagacgcctgaaatgtactagcgatcttaactactttaaactagccatggtttttgctgttatgctcttaatttgcagaacctgcctattcaacccttattaccttatggtcacactaggttttgcttatgaaggacatgcttgctgtgaaacaaacttatctgtttcctcttttgaactatgttatcattatgtcattctcagtcatcccattgcttgttgtgttcctgagtcagagggtaactttgttcctggcctcatatttcacttttgattctgatattagtcacaaggggattcagagaacttgcaaataaacccattcacaaattcatcacacttgctgacaaattaaacaatgcccttctgtgggtggaatgtcatttgtatgaaaaaaagaattgttaactgcatcctttcagccttactccttccccatgctatgccttctttgtgacagtacttattacaacatccagaagagggtaaattggggttggggattgagggaatgaaaagaaaataaaactcagttttttggctcccttgcctatcagttttaactgtagctattatagacggggagatgcaggctttctgaacacagtggcatgtgcacttgagtaggcctgtgtcctgcccaagatggagcttggatgtctgcaggtggaagaaggccatttggacttgagccatctttgatgtccaaatcactaagcagggaccatgcaaagacacaggagggaggccatgagggcatcaagccagatgagcttgccagcctcagcaaccagccagggatgggggcagggctgcccaagtaggtggggcaggaagcccagccctcaacaaaaccctattatattctttgtcttagtgaggaagttcttactgttgtgtgtattattggaagacatcttctgtgatagggttattattgcatgtacagagagattccttggaaccgcatatgactcaatctatctcactcagatttctcaccataccttcacttattttgctgcagtgtccagcagatctccttgaaacagtgtgtactgaagacctaactaaatcctccaaattacctggttggttcagagaaccaaatcactggagctttgtagggaaggtttgactttcagggctttagccagagtaacttatttaatgattggcttttaatgtgtttctgtgcaaagatcaaagcaggtgaattttcatgtatttttagaattctagtagaaaaggaagataggaaaatctagttcaagtatacattctagtttttaggggaatttgtgtttttattttacttttttggttgctacgatttgtcctatattctatatttataagaacataaatatgtaattaaaagaatatatttgatggcactacctgtcaacaaagccacttatttgtgaaattttttggtaacttgatggaaatagtcacattttatccattgaaaactacaaagctcttatctattgttctttgtgtatatttatgcattaaaaatagatcctgcaggatgagcagatgtactgaagtgtaaatccgttttttaagagaggctatatggaaaaatatatcattcaagactcagtctctgccttgcctataggcctcgtcagtgtttagtgaatgacctcaaccctgtttttttccttccttctttggtggttgaggacagacaatgaatggtctctgtactcgcctgggctcagctgggtggtggccattatgccattgtgctcactggagagggctgccgggtttgtagagctgcggatcccggccttccctgacattgccaatctcttttctttcagctccaccagcccattggagaaaagttactgttcagtccctgaaggcttgtgccataaaagagtgggagacattcccagggagtttcagcacccatttggactttcacaatcagagatggcagcggtaaaggcatcaacatcgaaagctaccaggccttggtattctcatccggtatatgcaagatactggcaacattatcatcaagcaatggcttggatgcaaagccatcacaatgcctacaggaaggccgtggaatcctgtttcaatcttccatggtacttaccttctgcgcttcttccccaaagctcttacgataatgaggctgcgtatcctcagtccttctatgaccatcatgtggcctggcaggactacccctgcagttcttcacatttcagaagatctgggcagcatccacgttacagcagtaggatccaggcatccacaaaagaagaccaagctttgtccaaagaggaagagatggagactgagtcagatgcagaggtagaatgtgacctgagcaatatggaaatcactgaagagctccgccagtactttgcagagaccgagaggcatagagaagaacgacggcggcagcagcagctggatgcagagcgcctggacagctatgtgaacgctgaccacgacctgtactgcaacacccgccggtcggtagaagccccaactgagaggcctggtgagcggcgccaggccgagatgaagcgtttgtacggggacagtgctgccaagatccaagccatggaggccgcggtgcagctgagctttgacaagcactgtgaccgaaagcagcccaagtactggccggtcatccccctgaagttctgagctcagggcacagggtacccagcctctccttcttccttttgggtacacgctctttatctctccttctgtacatttcttagggaaaggggactttgtactggggtacaggcatgttcaccacagtcccagtgggcctgtcacggggtggatgtactatgccagccacttggaggtctgcaggacatgttctgttgccaacatgataaattttctcctgacataaaataattttgcatatactatactggttttttatgttgttggtaacagttcaattcattaacgttcttgcctagagatactgcctggtgttttgcttttttatcttttcttgtctttaacctgtctgaactacacaaatgcctttaaaaaaccagatatcctctctgactctagctccattagcccccactaaaaatgagccaagtgtgtagtgagacaaataccactacctgtagtggagagggatgcatgttctataaagggccagagagtgaatatctttggcactgcaagccacacggtcagtgttgtgactactcaaccctccctttgtagtgtgaaagcagctgtagacagtaagtaaacaaatgggtgtggctgtgttctaataaaactttatttataaaaacaggcggccgggcgcaatggttcatgcctgtaatcccagcactttgggaggccgaggtgggcagatcacgaggtcaggagatggagaccatcctggccaacatgatgaaacccgtcgctactaaaatacaaaaaatgagccgggcatggtggtgtgtgcctgtaatcccagctacgtgggagactgaggcaggggaattgcttgaacccaggaggcagaggttgcagtgagctgagatcgcgccactgcactccaacctagagaaagagcaagactccgtctcaaaacaaaaacaaaaacagactgcaggccagatttggtctacagatggtagtttgccaactgcacctctcatggaatgaaaatcacctgcctgacatttttattcttgttatctcattatgtctacagagcttagatgtcatacagaattgagagcaaagaacaataattccggcccggcgcggtggctcatgcctgtaatcccagcactttgggaggctgaggtgggcagatcacgagatcaggagatcgagaccatcctggctaacacggtgaaaccccatctctactaaaaatacaaaaaattagccgggcgtggtggcgggcacctgtagtcccagctacttgggaggctgaggcaggagaatggcgtgaacccaggaggcggagcttgcagtgagccgagctccagcctgggcaacagagtgagactccatctcaaaagaaaaaaaaaaaagaacaataattcccaaacctggtcactgctgcagtcacctctgttgcagaaaacgcacagttgatttcttactat

SEQ ID NO: 8911 - protein, 343 aa, Homo sapiens
MTSTLFFSFLLWWLRTDNEWSLYSPGLSWVVAIMPLCSLERAAGFVELRIPAFPDIANLFSFSSTSPLEKSYCSVPEGLCHKRVGDIPREFQHPFGLSQSEMAAVKASTSKATRPWYSHPVYARYWQHYHQAMAWMQSHHNAYRKAVESCFNLPWYLPSALLPQSSYDNEAAYPQSFYDHHVAWQDYPCSSSHFRRSGQHPRYSSRIQASTKEDQALSKEEEMETESDAEVECDLSNMEITEELRQYFAETERHREERRRQQQLDAERLDSYVNADHDLYCNTRRSVEAPTERPGERRQAEMKRLYGDSAAKIQAMEAAVQLSFDKHCDRKQPKYWPVIPLKF

SEQ ID NO: 8912 - DNA, 2802 bp, Homo sapiens
ggaagcgcgcttccagtcgccccggcaacagccgcctccctcgcgtcccccactccccctctgtctctccaaggaaaactaggcccctgcgcggccaacgcccaggatccgcaagctgcgcgcccacgaggtgacttcggggacggctgggtttcctttggggagtgagggaggagcttagacgccccgggccctggcttcttctgatgcgcagagagccgaggtcttggacgtcacgttgctctcataattatcttaatcccgcgacaaaaggtggggccggaggcccatgagattcctaaatcattgcaggttaattgtgagaggggaccagtcccagaggctctcagctctgcagtgcttccgaatcactggacgactctttaagaattctgatccccgggcccccatcccggaccaatgaaatcagaatctctaatagtggggccctggcatcggtagtttttaaagctgcccaggtgattctggggtgccgagaaccaccgtgttaagctccaccagcccattggagaaaagttactgttcagtccctgaaggcttgtgccataaaagagtgggagacattcccagggagtttcagcacccatttggactttcacaatcagagatggcagcggtaaaggcatcaacatcgaaagctaccaggccttggtattctcatccggtatatgcaagatactggcaacattatcatcaagcaatggcttggatgcaaagccatcacaatgcctacaggaaggccgtggaatcctgtttcaatcttccatggtacttaccttctgcgcttcttccccaaagctcttacgataatgaggctgcgtatcctcagtccttctatgaccatcatgtggcctggcaggactacccctgcagttcttcacatttcagaagatctgggcagcatccacgttacagcagtaggatccaggcatccacaaaagaagaccaagctttgtccaaagaggaagagatggagactgagtcagatgcagaggtagaatgtgacctgagcaatatggaaatcactgaagagctccgccagtactttgcagagaccgagaggcatagagaagaacgacggcggcagcagcagctggatgcagagcgcctggacagctatgtgaacgctgaccacgacctgtactgcaacacccgccggtcggtagaagccccaactgagaggcctggtgagcggcgccaggccgagatgaagcgtttgtacggggacagtgctgccaagatccaagccatggaggccgcggtgcagctgagctttgacaagcactgtgaccgaaagcagcccaagtactggccggtcatccccctgaagttctgagctcagggcacagggtacccagcctctccttcttccttttgggtacacgctctttatctctccttctgtacatttcttagggaaaggggactttgtactggggtacaggcatgttcaccacagtcccagtgggcctgtcacggggtggatgtactatgccagccacttggaggtctgcaggacatgttctgttgccaacatgataaattttctcctgacataaaataattttgcatatactatactggttttttatgttgttggtaacagttcaattcattaacgttcttgcctagagatactgcctggtgttttgcttttttatcttttcttgtctttaacctgtctgaactacacaaatgcctttaaaaaaccagatatcctctctgactctagctccattagcccccactaaaaatgagccaagtgtgtagtgagacaaataccactacctgtagtggagagggatgcatgttctataaagggccagagagtgaatatctttggcactgcaagccacacggtcagtgttgtgactactcaaccctccctttgtagtgtgaaagcagctgtagacagtaagtaaacaaatgggtgtggctgtgttctaataaaactttatttataaaaacaggcggccgggcgcaatggttcatgcctgtaatcccagcactttgggaggccgaggtgggcagatcacgaggtcaggagatggagaccatcctggccaacatgatgaaacccgtcgctactaaaatacaaaaaatgagccgggcatggtggtgtgtgcctgtaatcccagctacgtgggagactgaggcaggggaattgcttgaacccaggaggcagaggttgcagtgagctgagatcgcgccactgcactccaacctagagaaagagcaagactccgtctcaaaacaaaaacaaaaacagactgcaggccagatttggtctacagatggtagtttgccaactgcacctctcatggaatgaaaatcacctgcctgacatttttattcttgttatctcattatgtctacagagcttagatgtcatacagaattgagagcaaagaacaataattccggcccggcgcggtggctcatgcctgtaatcccagcactttgggaggctgaggtgggcagatcacgagatcaggagatcgagaccatcctggctaacacggtgaaaccccatctctactaaaaatacaaaaaattagccgggcgtggtggcgggcacctgtagtcccagctacttgggaggctgaggcaggagaatggcgtgaacccaggaggcggagcttgcagtgagccgagctccagcctgggcaacagagtgagactccatctcaaaagaaaaaaaaaaaagaacaataattcccaaacctggtcactgctgcagtcacctctgttgcagaaaacgcacagttgatttcttactat

SEQ ID NO: 8913 - protein, 242 aa, Homo sapiens; identical to SEQ ID NO: 1279

SEQ ID NO: 8914 - DNA, 2340 bp, Homo sapiens
accggaagcgcgcttccagtcgccccggcaacagccgcctccctcgcgtcccccactccccctctgtctctccaaggaaaactaggcccctgcgcggccaacgcccaggatccgcaagctgcgcgcccacgagtttcagcacccatttggactttcacaatcagagatggcagcggtaaaggcatcaacatcgaaagctaccaggccttggtattctcatccggtatatgcaagatactggcaacattatcatcaagcaatggcttggatgcaaagccatcacaatgcctacaggaaggccgtggaatcctgtttcaatcttccatggtacttaccttctgcgcttcttccccaaagctcttacgataatgaggctgcgtatcctcagtccttctatgaccatcatgtggcctggcaggactacccctgcagttcttcacatttcagaagatctgggcagcatccacgttacagcagtaggatccaggcatccacaaaagaagaccaagctttgtccaaagaggaagagatggagactgagtcagatgcagaggtagaatgtgacctgagcaatatggaaatcactgaagagctccgccagtactttgcagagaccgagaggcatagagaagaacgacggcggcagcagcagctggatgcagagcgcctggacagctatgtgaacgctgaccacgacctgtactgcaacacccgccggtcggtagaagccccaactgagaggcctggtgagcggcgccaggccgagatgaagcgtttgtacggggacagtgctgccaagatccaagccatggaggccgcggtgcagctgagctttgacaagcactgtgaccgaaagcagcccaagtactggccggtcatccccctgaagttctgagctcagggcacagggtacccagcctctccttcttccttttgggtacacgctctttatctctccttctgtacatttcttagggaaaggggactttgtactggggtacaggcatgttcaccacagtcccagtgggcctgtcacggggtggatgtactatgccagccacttggaggtctgcaggacatgttctgttgccaacatgataaattttctcctgacataaaataattttgcatatactatactggttttttatgttgttggtaacagttcaattcattaacgttcttgcctagagatactgcctggtgttttgcttttttatcttttcttgtctttaacctgtctgaactacacaaatgcctttaaaaaaccagatatcctctctgactctagctccattagcccccactaaaaatgagccaagtgtgtagtgagacaaataccactacctgtagtggagagggatgcatgttctataaagggccagagagtgaatatctttggcactgcaagccacacggtcagtgttgtgactactcaaccctccctttgtagtgtgaaagcagctgtagacagtaagtaaacaaatgggtgtggctgtgttctaataaaactttatttataaaaacaggcggccgggcgcaatggttcatgcctgtaatcccagcactttgggaggccgaggtgggcagatcacgaggtcaggagatggagaccatcctggccaacatgatgaaacccgtcgctactaaaatacaaaaaatgagccgggcatggtggtgtgtgcctgtaatcccagctacgtgggagactgaggcaggggaattgcttgaacccaggaggcagaggttgcagtgagctgagatcgcgccactgcactccaacctagagaaagagcaagactccgtctcaaaacaaaaacaaaaacagactgcaggccagatttggtctacagatggtagtttgccaactgcacctctcatggaatgaaaatcacctgcctgacatttttattcttgttatctcattatgtctacagagcttagatgtcatacagaattgagagcaaagaacaataattccggcccggcgcggtggctcatgcctgtaatcccagcactttgggaggctgaggtgggcagatcacgagatcaggagatcgagaccatcctggctaacacggtgaaaccccatctctactaaaaatacaaaaaattagccgggcgtggtggcgggcacctgtagtcccagctacttgggaggctgaggcaggagaatggcgtgaacccaggaggcggagcttgcagtgagccgagctccagcctgggcaacagagtgagactccatctcaaaagaaaaaaaaaaaagaacaataattcccaaacctggtcactgctgcagtcacctctgttgcagaaaacgcacagttgatttcttactat

SEQ ID NO: 8915 - protein, 242 aa, Homo sapiens; identical to SEQ ID NO: 1279

SEQ ID NO: 8916 - DNA, 2441 bp, Homo sapiens
gccacgccacgtgttccgcaccggaagcgcgcttccagtcgccccggcaacagccgcctccctcgcgtcccccactccccctctgtctctccaaggaaaactaggcccctgcgcggccaacgcccaggatccgcaagctgcgcgcccacgagctccaccagcccattggagaaaagttactgttcagtccctgaaggcttgtgccataaaagagtgggagacattcccagggagtttcagcacccatttggactttcacaatcagagatggcagcggtaaaggcatcaacatcgaaagctaccaggccttggtattctcatccggtatatgcaagatactggcaacattatcatcaagcaatggcttggatgcaaagccatcacaatgcctacaggaaggccgtggaatcctgtttcaatcttccatggtacttaccttctgcgcttcttccccaaagctcttacgataatgaggctgcgtatcctcagtccttctatgaccatcatgtggcctggcaggactacccctgcagttcttcacatttcagaagatctgggcagcatccacgttacagcagtaggatccaggcatccacaaaagaagaccaagctttgtccaaagaggaagagatggagactgagtcagatgcagaggtagaatgtgacctgagcaatatggaaatcactgaagagctccgccagtactttgcagagaccgagaggcatagagaagaacgacggcggcagcagcagctggatgcagagcgcctggacagctatgtgaacgctgaccacgacctgtactgcaacacccgccggtcggtagaagccccaactgagaggcctggtgagcggcgccaggccgagatgaagcgtttgtacggggacagtgctgccaagatccaagccatggaggccgcggtgcagctgagctttgacaagcactgtgaccgaaagcagcccaagtactggccggtcatccccctgaagttctgagctcagggcacagggtacccagcctctccttcttccttttgggtacacgctctttatctctccttctgtacatttcttagggaaaggggactttgtactggggtacaggcatgttcaccacagtcccagtgggcctgtcacggggtggatgtactatgccagccacttggaggtctgcaggacatgttctgttgccaacatgataaattttctcctgacataaaataattttgcatatactatactggttttttatgttgttggtaacagttcaattcattaacgttcttgcctagagatactgcctggtgttttgcttttttatcttttcttgtctttaacctgtctgaactacacaaatgcctttaaaaaaccagatatcctctctgactctagctccattagcccccactaaaaatgagccaagtgtgtagtgagacaaataccactacctgtagtggagagggatgcatgttctataaagggccagagagtgaatatctttggcactgcaagccacacggtcagtgttgtgactactcaaccctccctttgtagtgtgaaagcagctgtagacagtaagtaaacaaatgggtgtggctgtgttctaataaaactttatttataaaaacaggcggccgggcgcaatggttcatgcctgtaatcccagcactttgggaggccgaggtgggcagatcacgaggtcaggagatggagaccatcctggccaacatgatgaaacccgtcgctactaaaatacaaaaaatgagccgggcatggtggtgtgtgcctgtaatcccagctacgtgggagactgaggcaggggaattgcttgaacccaggaggcagaggttgcagtgagctgagatcgcgccactgcactccaacctagagaaagagcaagactccgtctcaaaacaaaaacaaaaacagactgcaggccagatttggtctacagatggtagtttgccaactgcacctctcatggaatgaaaatcacctgcctgacatttttattcttgttatctcattatgtctacagagcttagatgtcatacagaattgagagcaaagaacaataattccggcccggcgcggtggctcatgcctgtaatcccagcactttgggaggctgaggtgggcagatcacgagatcaggagatcgagaccatcctggctaacacggtgaaaccccatctctactaaaaatacaaaaaattagccgggcgtggtggcgggcacctgtagtcccagctacttgggaggctgaggcaggagaatggcgtgaacccaggaggcggagcttgcagtgagccgagctccagcctgggcaacagagtgagactccatctcaaaagaaaaaaaaaaaagaacaataattcccaaacctggtcactgctgcagtcacctctgttgcagaaaacgcacagttgatttcttactat

SEQ ID NO: 8917 - protein, 242 aa, Homo sapiens; identical to SEQ ID NO: 1279

SEQ ID NO: 8918 - DNA, 1674 bp, Homo sapiens
agtcgccccggcaacagccgcctccctcgcgtcccccactccccctctgtctctccaaggaaaactaggcccctgcgcggccaacgcccaggatccgcaagctgcgcgcccacgagctccaccagcccattggagaaaagttactgttcagtccctgaaggcttgtgccataaaagagtgggagacattcccagggaggtgaggaatgaaagatcgaattaaagaccattaaagaccaaagggcatctaaatctgcagcaaccatcagctctcttttctttgagagtttcagcacccatttggactttcacaatcagagatggcagcggtaaaggcatcaacatcgaaagctaccaggccttggtattctcatccggtatatgcaagatactggcaacattatcatcaagcaatggcttggatgcaaagccatcacaatgcctacaggaaggccgtggaatcctgtttcaatcttccatggtacttaccttctgcgcttcttccccaaagctcttacgataatgaggctgcgtatcctcagtccttctatgaccatcatgtggcctggcaggactacccctgcagttcttcacatttcagaagatctgggcagcatccacgttacagcagtaggatccaggcatccacaaaagaagaccaagctttgtccaaagaggaagagatggagactgagtcagatgcagaggtagaatgtgacctgagcaatatggaaatcactgaagagctccgccagtactttgcagagaccgagaggcatagagaagaacgacggcggcagcagcagctggatgcagagcgcctggacagctatgtgaacgctgaccacgacctgtactgcaacacccgccggtcggtagaagccccaactgagaggcctggtgagcggcgccaggccgagatgaagcgtttgtacggggacagtgctgccaagatccaagccatggaggccgcggtgcagctgagctttgacaagcactgtgaccgaaagcagcccaagtactggccggtcatccccctgaagttctgagctcagggcacagggtacccagcctctccttcttccttttgggtacacgctctttatctctccttctgtacatttcttagggaaaggggactttgtactggggtacaggcatgttcaccacagtcccagtgggcctgtcacggggtggatgtactatgccagccacttggaggtctgcaggacatgttctgttgccaacatgataaattttctcctgacataaaataattttgcatatactatactggttttttatgttgttggtaacagttcaattcattaacgttcttgcctagagatactgcctggtgttttgcttttttatcttttcttgtctttaacctgtctgaactacacaaatgcctttaaaaaaccagatatcctctctgactctagctccattagcccccactaaaaatgagccaagtgtgtagtgagacaaataccactacctgtagtggagagggatgcatgttctataaagggccagagagtgaatatctttggcactgcaagccacacggtcagtgttgtgactactcaaccctccctttgtagtgtgaaagcagctgtagacagtaagtaaacaaatgggtgtggctgtgttctaataaaactttatttat

SEQ ID NO: 8919 - protein, 242 aa, Homo sapiens; identical to SEQ ID NO: 1279

SEQ ID NO: 8920 - DNA, 3272 bp, Homo sapiens
ttaaatatttgcttcctgaaaagatttggtgctttatagtcagttttttgagttactaggtcctcagagattttggggagtagatgcaggaggagagaacgttatcaggaaacaacagacaagctcaacaatttcagcagcatctaagagcatgaaatattagctattatttttatgctggaaggaaaataggaaacttaaaaggagtagattgtagaatccatgcctacaggtaactgagtaagtgcccaagtaaatgaggcatagtgagtgcctataaattcagaaaagagagattaacatggaattaccgtgaatatgtttatagaaaaaagtaaatttgaaataagacgcctgaaatgtactagcgatcttaactactttaaactagccatggtttttgctgttatgctcttaatttgcagaacctgcctattcaacccttattaccttatggtcacactaggttttgcttatgaaggacatgcttgctgtgaaacaaacttatctgtttcctcttttgaactatgttatcattatgtcattctcagtcatcccattgcttgttgtgttcctgagtcagagggtaactttgttcctggcctcatatttcacttttgattctgatattagtcacaaggggattcagagaacttgcaaataaacccattcacaaattcatcacacttgctgacaaattaaacaatgcccttctgtgggtggaatgtcatttgtatgaaaaaaagaattgttaactgcatcctttcagccttactccttccccatgctatgccttctttgtgacagtacttattacaacatccagaagagggtaaattggggttggggattgagggaatgaaaagaaaataaaactcagttttttggctcccttgcctatcagttttaactgtagctattatagacggggagatgcaggctttctgaacacagtggcatgtgcacttgagtaggcctgtgtcctgcccaagatggagcttggatgtctgcaggtggaagaaggccatttggacttgagccatctttgatgtccaaatcactaagcagggaccatgcaaagacacaggagggaggccatgagggcatcaagccagatgagcttgccagcctcagcaaccagccagggatgggggcagggctgcccaagtaggtggggcaggaagcccagccctcaacaaaaccctattatattctttgtcttagtgaggaagttcttactgttgtgtgtattattggaagacatcttctgtgatagggttattattgcatgtacagagagattccttggaaccgcatatgactcaatctatctcactcagatttctcaccataccttcacttattttgctgcagtgtccagcagatctccttgaaacagtgtgtactgaagacctaactaaatcctccaaattacctggttggttcagagaaccaaatcactggagctttgtagggaaggtttgactttcagggctttagccagagtaacttatttaatgattggcttttaatgtgtttctgtgcaaagatcaaagcaggtgaattttcatgtatttttagaattctagtagaaaaggaagataggaaaatctagttcaagtatacattctagtttttaggggaatttgtgtttttattttacttttttggttgctacgatttgtcctatattctatatttataagaacataaatatgtaattaaaagaatatatttgatggcactacctgtcaacaaagccacttatttgtgaaattttttggtaacttgatggaaatagtcacattttatccattgaaaactacaaagctcttatctattgttctttgtgtatatttatgcattaaaaatagatcctgcaggatgagcagatgtactgaagtgtaaatccgttttttaagagaggctatatggaaaaatatatcattcaagactcagtctctgccttgcctataggcctcgtcagtgtttagtgaatgacctcaaccctgtttttttccttccttctttggtggttgaggacagacaatgaatggtctctgtactcgcctgggctcagctgggtggtggccattatgccattgtgctcactggagagggctgccgggtttgtagagctgcggatcccggccttccctgacattgccaatctcttttctttcagctccaccagcccattggagaaaagttactgttcagtccctgaaggcttgtgccataaaagagtgggagacattcccagggagtttcagcacccatttggactttcacaatcagagatggcagcggtaaaggcatcaacatcgaaagctaccaggccttggtattctcatccggtatatgcaagatactggcaacattatcatcaagcaatggcttggatgcaaagccatcacaatgcctacaggaaggccgtggaatcctgtttcaatcttccatggtacttaccttctgcgcttcttccccaaagctcttacgataatgaggctgcgtatcctcagtccttctatgaccatcatgtggcctggcaggactacccctgcagttcttcacatttcagaagatctgggcagcatccacgttacagcagtaggatccaggcatccacaaaagaagaccaagctttgtccaaagaggaagagatggagactgagtcagatgcagaggtagaatgtgacctgagcaatatggaaatcactgaagagctccgccagtactttgcagagaccgagaggcatagagaagaacgacggcggcagcagcagctggatgcagagcgcctggacagctatgtgaacgctgaccacgacctgtactgcaacacccgccggtcggtagaagccccaactgagaggcctggtgagcggcgccaggccgagatgaagcgtttgtacggggacagtgctgccaagatccaagccatggaggccgcggtgcagctgagctttgacaagcactgtgaccgaaagcagcccaagtactggccggtcatccccctgaagttctgagctcagggcacagggtacccagcctctccttcttccttttgggtacacgctctttatctctccttctgtacatttcttagggaaaggggactttgtactggggtacaggcatgttcaccacagtcccagtgggcctgtcacggggtggatgtactatgccagccacttggaggtctgcaggacatgttctgttgccaacatgataaattttctcctgacataaaataattttgcatatactat

SEQ ID NO: 8921 - protein, 343 aa, Homo sapiens; identical to SEQ ID NO: 8911

SEQ ID NO: 8922 - DNA, 1600 bp, Homo sapiens
ggaagcgcgcttccagtcgccccggcaacagccgcctccctcgcgtcccccactccccctctgtctctccaaggaaaactaggcccctgcgcggccaacgcccaggatccgcaagctgcgcgcccacgaggtgacttcggggacggctgggtttcctttggggagtgagggaggagcttagacgccccgggccctggcttcttctgatgcgcagagagccgaggtcttggacgtcacgttgctctcataattatcttaatcccgcgacaaaaggtggggccggaggcccatgagattcctaaatcattgcaggttaattgtgagaggggaccagtcccagaggctctcagctctgcagtgcttccgaatcactggacgactctttaagaattctgatccccgggcccccatcccggaccaatgaaatcagaatctctaatagtggggccctggcatcggtagtttttaaagctgcccaggtgattctggggtgccgagaaccaccgtgttaagctccaccagcccattggagaaaagttactgttcagtccctgaaggcttgtgccataaaagagtgggagacattcccagggagtttcagcacccatttggactttcacaatcagagatggcagcggtaaaggcatcaacatcgaaagctaccaggccttggtattctcatccggtatatgcaagatactggcaacattatcatcaagcaatggcttggatgcaaagccatcacaatgcctacaggaaggccgtggaatcctgtttcaatcttccatggtacttaccttctgcgcttcttccccaaagctcttacgataatgaggctgcgtatcctcagtccttctatgaccatcatgtggcctggcaggactacccctgcagttcttcacatttcagaagatctgggcagcatccacgttacagcagtaggatccaggcatccacaaaagaagaccaagctttgtccaaagaggaagagatggagactgagtcagatgcagaggtagaatgtgacctgagcaatatggaaatcactgaagagctccgccagtactttgcagagaccgagaggcatagagaagaacgacggcggcagcagcagctggatgcagagcgcctggacagctatgtgaacgctgaccacgacctgtactgcaacacccgccggtcggtagaagccccaactgagaggcctggtgagcggcgccaggccgagatgaagcgtttgtacggggacagtgctgccaagatccaagccatggaggccgcggtgcagctgagctttgacaagcactgtgaccgaaagcagcccaagtactggccggtcatccccctgaagttctgagctcagggcacagggtacccagcctctccttcttccttttgggtacacgctctttatctctccttctgtacatttcttagggaaaggggactttgtactggggtacaggcatgttcaccacagtcccagtgggcctgtcacggggtggatgtactatgccagccacttggaggtctgcaggacatgttctgttgccaacatgataaattttctcctgacataaaataattttgcatatactat

SEQ ID NO: 8923 - protein, 242 aa, Homo sapiens; identical to SEQ ID NO: 1279

SEQ ID NO: 8924 - DNA, 1138 bp, Homo sapiens
accggaagcgcgcttccagtcgccccggcaacagccgcctccctcgcgtcccccactccccctctgtctctccaaggaaaactaggcccctgcgcggccaacgcccaggatccgcaagctgcgcgcccacgagtttcagcacccatttggactttcacaatcagagatggcagcggtaaaggcatcaacatcgaaagctaccaggccttggtattctcatccggtatatgcaagatactggcaacattatcatcaagcaatggcttggatgcaaagccatcacaatgcctacaggaaggccgtggaatcctgtttcaatcttccatggtacttaccttctgcgcttcttccccaaagctcttacgataatgaggctgcgtatcctcagtccttctatgaccatcatgtggcctggcaggactacccctgcagttcttcacatttcagaagatctgggcagcatccacgttacagcagtaggatccaggcatccacaaaagaagaccaagctttgtccaaagaggaagagatggagactgagtcagatgcagaggtagaatgtgacctgagcaatatggaaatcactgaagagctccgccagtactttgcagagaccgagaggcatagagaagaacgacggcggcagcagcagctggatgcagagcgcctggacagctatgtgaacgctgaccacgacctgtactgcaacacccgccggtcggtagaagccccaactgagaggcctggtgagcggcgccaggccgagatgaagcgtttgtacggggacagtgctgccaagatccaagccatggaggccgcggtgcagctgagctttgacaagcactgtgaccgaaagcagcccaagtactggccggtcatccccctgaagttctgagctcagggcacagggtacccagcctctccttcttccttttgggtacacgctctttatctctccttctgtacatttcttagggaaaggggactttgtactggggtacaggcatgttcaccacagtcccagtgggcctgtcacggggtggatgtactatgccagccacttggaggtctgcaggacatgttctgttgccaacatgataaattttctcctgacataaaataattttgcatatactat

SEQ ID NO: 8925 - protein, 242 aa, Homo sapiens; identical to SEQ ID NO: 1279

SEQ ID NO: 8926 - DNA, 1239 bp, Homo sapiens
gccacgccacgtgttccgcaccggaagcgcgcttccagtcgccccggcaacagccgcctccctcgcgtcccccactccccctctgtctctccaaggaaaactaggcccctgcgcggccaacgcccaggatccgcaagctgcgcgcccacgagctccaccagcccattggagaaaagttactgttcagtccctgaaggcttgtgccataaaagagtgggagacattcccagggagtttcagcacccatttggactttcacaatcagagatggcagcggtaaaggcatcaacatcgaaagctaccaggccttggtattctcatccggtatatgcaagatactggcaacattatcatcaagcaatggcttggatgcaaagccatcacaatgcctacaggaaggccgtggaatcctgtttcaatcttccatggtacttaccttctgcgcttcttccccaaagctcttacgataatgaggctgcgtatcctcagtccttctatgaccatcatgtggcctggcaggactacccctgcagttcttcacatttcagaagatctgggcagcatccacgttacagcagtaggatccaggcatccacaaaagaagaccaagctttgtccaaagaggaagagatggagactgagtcagatgcagaggtagaatgtgacctgagcaatatggaaatcactgaagagctccgccagtactttgcagagaccgagaggcatagagaagaacgacggcggcagcagcagctggatgcagagcgcctggacagctatgtgaacgctgaccacgacctgtactgcaacacccgccggtcggtagaagccccaactgagaggcctggtgagcggcgccaggccgagatgaagcgtttgtacggggacagtgctgccaagatccaagccatggaggccgcggtgcagctgagctttgacaagcactgtgaccgaaagcagcccaagtactggccggtcatccccctgaagttctgagctcagggcacagggtacccagcctctccttcttccttttgggtacacgctctttatctctccttctgtacatttcttagggaaaggggactttgtactggggtacaggcatgttcaccacagtcccagtgggcctgtcacggggtggatgtactatgccagccacttggaggtctgcaggacatgttctgttgccaacatgataaattttctcctgacataaaataattttgcatatactat

SEQ ID NO: 8927 - protein, 242 aa, Homo sapiens; identical to SEQ ID NO: 1279

SEQ ID NO: 8928 - DNA, 809 bp, Homo sapiens
ttgaggataataaacactttggtgtccaccctccacctcctttcattttgtaggcatcaacatcgaaagctaccaggccttggtattctcatccggtatatgcaagatactggcaacattatcatcaagcaatggcttggatgcaaagccatcacaatgcctacaggaaggccgtggaatcctgtttcaatcttccatggtacttaccttctgcgcttcttccccaaagctcttacgataatgaggctgcgtatcctcagtccttctatgaccatcatgtggcctggcaggactacccctgcagttcttcacatttcagaagatctgggcagcatccacgttacagcagtaggatccaggcatccacaaaagaagaccaagctttgtccaaagaggaagagatggagactgagtcagatgcagaggtagaatgtgacctgagcaatatggaaatcactgaagagctccgccagtactttgcagagaccgagaggcatagagaagaacgacatattcacaggtgcacaaaaccgatcagtgagatgatacgtgttaatggctgtagaaaagtggaaaggaacatgaaaatgcacttctgttgtaaaagtaaaaatggcggttgtccagtaacttcaggattacatttgtcatggggcaagggatgtgcgacgaagagagaagaccagtctgaaatggctccagttctgctggcatgtacctgtgttctgggtggttgctgacaagccagaaatgaggcattcatggcatacatcaagtttgtgctttccctcggttgtgctacaattatt

SEQ ID NO: 8929 - protein, 202 aa, Homo sapiens
MAWMQSHHNAYRKAVESCFNLPWYLPSALLPQSSYDNEAAYPQSFYDHHVAWQDYPCSSSHFRRSGQHPRYSSRIQASTKEDQALSKEEEMETESDAEVECDLSNMEITEELRQYFAETERHREERHIHRCTKPISEMIRVNGCRKVERNMKMHFCCKSKNGGCPVTSGLHLSWGKGCATKREDQSEMAPVLLACTCVLGGC

SEQ ID NO: 8930 - DNA, 1527 bp, Homo sapiens
gcgtacgtgcagcaaccgactccgcccagcgaggcggagcctagggaagccgcgggcggcccgccgctgtcctggagctgctgctgctgctgcggcggctgcaccggcggcgccgaggccgagatcgaggccggggtgcgcgcttcgcaaacgtgccctatccgtgcggcttggctgcgccagcccttgcggccacccgggcgtctaggcgggtctgtgcgccgcccgggcgaggatgcggctgttccggtggctgctgaagcagccggtgcccaagcagatcgagcgctactcgcgcttttcgccgtcgccgctctccatcaaacaattcctggacttcgggagagataatgcatgtgagaaaacttcatatatgtttctacgaaaggaacttcctgtgcggctggctaacacaatgagagaagttaatcttctgccggataatttacttaaccgcccttcagtgggattggttcagagttggtatatgcagagttttcttgaacttttagaatatgaaaataagagccctgaggatccacaggtcttggataactttctacaagttctgattaaagtcagaaatagacacaatgatgtggttcctacaatggcacaaggagtgattgaatacaaggagaagtttgggtttgatcctttcattagcactaacatccaatattttctggatcggttttataccaaccgcatctctttccgcatgcttattaatcagcacacacttctgtttgggggtgacactaatcctgttcatcctaaacacataggaagtatcgatcccacctgtaacgtggcggatgtggtgaaagatgcatatgaaacagccaagatgctgtgtgaacagtattacctggtagctccagagctggaagttgaagaattcaatgccaaagcgccagacaaacctattcaggtggtttatgtgccctcacatctgtttcatatgctatttgagttgttcaagaactcaatgagagcgacagttgaactctatgaagacagaaaagagggctaccctgctgttaaaaccctcgttactttgggtaaagaagacttatccattaagatcagtgacctaggtggtggtgtcccacttcgaaaaatagatcgtctttttaactacatgtattctactgctcctagacccagcctggagcctaccagagctgcccctttggctggatttggttatggtttgccaatttcccgtctgtatgctagatattttcaaggagatctgaaactgtattccatggaaggagtgggtactgatgctgtcatttatttgaaggctctttcaagtgagtcatttgagagacttccagtttttaataagtccgcatggcgccattacaagaccacgcctgaagccgatgattggagcaatcccagcagtgaacccagggatgcttcaaaatacaaagcaaaacagtaatataccaccttgatttccattacaaagtatctgatttgtctgaataaaggtgtcccactcactgttccagg

SEQ ID NO: 8931 - protein, 406 aa, Homo sapiens; identical to SEQ ID NO: 1281

SEQ ID NO: 8932 - DNA, 1809 bp, Homo sapiens
gcgtacgtgcagcaaccgactccgcccagcgaggcggagcctagggaagccgcgggcggcccgccgctgtcctggagctgctgctgctgctgcggcggctgcaccggcggcgccgaggccgagatcgaggccggggtgcgcgcttcgcaaacgtgccctatccgtgcggcttggctgcgccagcccttgcggccacccgggcgtctaggcgggtctgtgcgccgcccgggcgaggatgcggctgttccggtggctgctgaagcagccggtgcccaagcagatcgagcgctactcgcgcttttcgccgtcgccgctctccatcaaacaattcctggacttcgggagagataatgcatgtgagaaaacttcatatatgtttctacgaaaggaacttcctgtgcggctggctaacacaatgagagaagttaatcttctgccggataatttacttaaccgcccttcagtgggattggttcagagttggtatatgcagagttttcttgaacttttagaatatgaaaataagagccctgaggatccacaggtcttggataactttctacaagttctgattaaagtcagaaatagacacaatgatgtggttcctacaatggcacaaggagtgattgaatacaaggagaagtttgggtttgatcctttcattagcactaacatccaatattttctggatcggttttataccaaccgcatctctttccgcatgcttattaatcagcacacacttctgtttgggggtgacactaatcctgttcatcctaaacacataggaagtatcgatcccacctgtaacgtggcggatgtggtgaaagatgcatatgaaacagccaagatgctgtgtgaacagtattacctggtagctccagagctggaagttgaagaattcaatgccaaagcgccagacaaacctattcaggtggtttatgtgccctcacatctgtttcatatgctatttgagttgttcaagaactcaatgagagcgacagttgaactctatgaagacagaaaagagggctaccctgctgttaaaaccctcgttactttgggtaaagaagacttatccattaagatcagtgacctaggtggtggtgtcccacttcgaaaaatagatcgtctttttaactacatgtattctactgctcctagacccagcctggagcctaccagagctgcccctttggctggatttggttatggtttgccaatttcccgtctgtatgctagatattttcaaggagatctgaaactgtattccatggaaggagtgggtactgatgctgtcatttatttgaaggctctttcaagtgagtcatttgagagacttccagtttttaataagtccgcatggcgccattacaagaccacgcctgaagccgatgattggagcaatcccagcagtgaacccagggatgcttcaaaatacaaagcaaaacagtaatataccaccttgatttccattacaaagtatctgatttgtctgaataaaggtgtcccactcactgttccaggaattcttgcagtgtagaggtattcacaacagcaagcagggatttggcctgccatcaattttatttaaaaagcaattaagtttgcagtttgtcctcataaacgttgtaggttgaaactgaaaaataagttaaaatgatcaatcaagataaaaggtgatctatccatccaatggaatattatttggccttaaaaaggaaggacattctgatatgtgctgcaacatgggtgaatcttgaagtcattatgctaagtgaaataaaccagacataaaaggacaaatac

SEQ ID NO: 8933 - protein, 406 aa, Homo sapiens; identical to SEQ ID NO: 1281

SEQ ID NO: 8934 - DNA, 740 bp, Homo sapiens
gtcctggagctgctgctgctgctgcggcggctgcaccggcggcgccgaggccgagatcgaggccggggtgcgcgcttcgcaaacgtgccctatccgtgcggcttggctgcgccagcccttgcggccacccgggcgtctaggcgggtctgtgcgccgcccgggcgaggatgcggctgttccggtggctgctgaagcagccggtgcccaagcagatcgagcgctactcgcgcttttcgccgtcgccgctctccatcaaacaattcctggacttcgggagagataatgcatgtgagaaaacttcatatatgtttctacgaaaggaacttcctgtgcggctggctaacacaatgagagaagttaatcttctgccggataatttacttaaccgcccttcagtgggattggttcagagttggtatatgcagagttttcttgaacttttagaatatgaaaataagagccctgaggatccacaggtcttggataagtaagtatggtaccacttagctgaaagtaaaaatatctaggtaagaaagattttggtaaatgtaattcaagtcattaagactcaaggagtatgaatgtggacaaaagcgttcattttcttaatgagtagtgactcaacattgagttttttttttttaattcgagctaagaatgtaacacaatacaaaagtaataatgacactttcagttttgcttttatgatctaatacttaatacctttacccaaggtgaac

SEQ ID NO: 8935 - protein, 107 aa, Homo sapiens
MRLFRWLLKQPVPKQIERYSRFSPSPLSIKQFLDFGRDNACEKTSYMFLRKELPVRLANTMREVNLLPDNLLNRPSVGLVQSWYMQSFLELLEYENKSPEDPQVLDK

SEQ ID NO: 8936 - DNA, 1994 bp, Homo sapiens
tgtttttgtaggtttgcctgaatccatcattgcagctgcatgttcaagaagtggccggagagttctgcatgttgattcgtaagctgtacataggcagcaaactaagctgcagtgatgttgcctatatttaaattttctcaaatggccaagctctgatggtctactttatttgagcaatagttgagacttataattgcctataaataaacaaacaaatgaactatttgtttttttttctcacaacatctggcctatattgtctgtcaggaagccatggctccaatgtaaagtacatagttcttacatacttcaactgcagctggtccctgacctcaccaggtttcagagatgttcttaaaggaagccagctgtggcaggtcacagattcatgggaaatggaaagaaccaaggaatatagctcttgcctcacctttctacccactgcagatatagttcaagccagagtaatggaagaacttaacttactagcctctcaggctgctcctatccctacctcccagtgtacagcccctccccatctctttagtcccctttccctcacttccccttttataatgtcacacaaatcagggacagtaggatcacattataacctactttgtcatagggattcgatttttcttatatcaaatcatgtttcctgaaacccagctggggcatatgcactcaatgtctaatacatacttattaatgtaccggatattggccttgcccctggatatcagcaatatattataaaaggttccagtagatgagacgattgagtctgaatacaattgcagtaaattgtgccaataaagatattgtactgttacggtcttagagttaaagccgcttgaatgcagcatgcacattcatgtaaacagacaatcagggtaggcctagaataaccacaaaaattctattggccttactgcagccacctatatgtagaacaatggaggagatagtttgtggtccattattgtaccctgtttcatccattagcatcagaatctctctttcaggtcatttattaaatatgattgaaatgtttaaaagttcctgaacatgattcatgatgattaaaatatcatacaactgataaaagactttaagaactttatatatttcctgttgcctcaaaatgtaacagaaattattcttagagctttgattttagctatcctaattactgcaaataaatatttgttcttatagttttaaatcaaaaagaaaagtcttgttataaaaccttaagcttgaaatcatattaataaaatatattgtacatagtggaaaattttcagtagctaatttaaaatttcagaaaatgctattaaagaattttgattcaagtatttaaactgtttagttatgcatgcttcttattaaccgaaaatgataataccatttagtttagtgatcagtatgagaagcaatacctaatcctatgttgctattgtattttttcctagttggtgtgcctgctcagaaaaacatatactgtatgtgtatacatacctgtgtatatataaaaggtcaatttatatatttttctataggaaaatggagtaacaagttccctatctcccatatttatttgtccatagtaaaatggccacattgatgataatttctagaactagtttctgagattgtcagccctttgtctaaaataatggcagtattaatgattgacttctgtcactgccatagttacctggattgtcagccttggtagcctttgtctaaagtcctaaagagttccaaaaaaaatgtgttgaaatttaattgctaaatagtggttggtgattctttacagtaggaattgtaataattttcttgcaaataagttatttactgctattgatattgaataatttgtcttttattcagatatatttcaaaaagcatgaatatatgattattcataaattgtatactttaccagtaagttttcagaggaaataaagacttttaaatccttttca

SEQ ID NO: 8937 - protein, 149 aa, Homo sapiens
MNYLFFFLTTSGLYCLSGSHGSNVKYIVLTYFNCSWSLTSPGFRDVLKGSQLWQVTDSWEMERTKEYSSCLTFLPTADIVQARVMEELNLLASQAAPIPTSQCTAPPHLFSPLSLTSPFIMSHKSGTVGSHYNLLCHRDSIFLISNHVS

SEQ ID NO: 8938 - DNA, 1964 bp, Homo sapiens
acctactaacccacttcctgcttatcctggatatttcatgtgtatatactattgaataactatataatttatcaagttggtttgtccatttgaaacataaggaaatcaatttatgttatcttctctatagggaaaattttaggatgaatgtgatcataaaccctttgatactagtgagaagaagtaatagaagtccaaaggagcatgactggagtaaaatctaattaacttactaatcaaaatagagtgtgtagatgcaaatttactaaatgtttacatacgaagctctgatttcctactatgtctagtcatggcttaatcggtaataggctacacagtgtagtaattgacaaacatattgtattttagaatgtaaataaaatttatttctatatttagaaaatgaacaagtagaaaagccaagaattctgtgggctctttacttcaatatgagagattcgtcagacatcagcaggagctgttataatgatttaccatccaacgtttatgtctgctctggcccagattgtggtttaggaaatgataatgcagtcaaacaggctgaaacacttttccaggaaatctgccccaatgaagatttctgtccccctccaccaaatcctgaagacattatccttgatggagacagtttacagccagaggcttcagaatccagtgccataccagaggctaactcggagactttcaaggaaagcacaaaccttggaaacctagaggagtcctctgaataatggatatacaccaaactggatacccaactttggaaattctgactggtctcagagtctacttgatagaaggactgtttgagaaatgttagaaagcagcagcaattataaggcaaaataggtaatagaaatccaaaaggggattttccttatagaggacattccaagaacacacaacacttataaagcacattgacttgctcattttaaataccaaacttgtgtgactagcagatgaaaattataaatcaattgattctcaggaatgtaactgtggatatgaaagtgatcctatgcattgttaataattccatggtcttaggacaattttgcttaccactttggatctttgtttgaaagccacattttcagaaccagctcatgtattttctttggttatttgaattttattttctttatggacaagagcatcataacataatgataaaaacatatagaaaaactaaagtatcatgatctagatagaagcctgtatttggaatacaggtttgttttgctttctatgttgagaagcattgaaaatgctaatataaaggtgtttagacatttttacgaataagtcagtagtgttttttagtatcagtagtgatatttgtttgtaaattatttacatattgggaaaggtcaataatgaagaaatgaaagaatggaaggaaaggtgtggataggctcattggtatttgaatattctgtctgtcaagtaactagagtattaggctaattgtctacagacctaatttaatcctggctgtcctactgatgatatttggtaaattgtttaacttctgagcctacgtttctccatatataaagtggaaatagtattactatgcctactatatgagaatggttatgaagacaatgcaatgccatgtttagaatcggtttgccagaagaaaattgttttagaattttcccattgacttgatgaatctcaaaagtctcacgcaggaaataattgcttgctgtcagtcaacttccaaacaaaatagatcacagtgtttttattgcattaagctttttaaatgaaaatttcttttttaaagtagtattttatagtcttacagaccagtaaaaatagtaacaagtagaattgtggttttgaaatattactaaggaaaacactctataaattgttttattccttttctggtaggtaaacctgcaaccaccaaggactccaaattgtgtatg

SEQ ID NO: 8939 - protein, 100 aa, Homo sapiens [sequence omitted]

SEQ ID NO: 8940 - DNA, 3204 bp, Homo sapiens
taatagtcacatgacacgtttcccgtcaagatggcggatactctcccttcggagtttgatgtgatcgtaatagggacgggtttgcctgaatccatcattgcagctgcatgttcaagaagtggccggagagttctgcatgttgattcaagaagctactatggaggaaactgggccagttttagcttttcaggactattgtcctggctaaaggaataccaggaaaacagtgacattgtaagtgacagtccagtgtggcaagaccagatccttgaaaatgaagaagccattgctcttagcaggaaggacaaaactattcaacatgtggaagtattttgttatgccagtcaggatttgcatgaagatgtcgaagaagctggtgcactgcagaaaaatcatgctcttgtgacatctgcaaactccacagaagctgcagattctgccttcctgcctacggaggatgagtcattaagcactatgagctgtgaaatgctcacagaacaaactccaagcagcgatccagagaatgcgctagaagtaaatggtgctgaagtgacaggggaaaaagaaaaccattgtgatgataaaacttgtgtgccatcaacttcagcagaagacatgagtgaaaatgtgcctatagcagaagataccacagagcaaccaaagaaaaacagaattacttactcacaaattattaaagaaggcaggagatttaatattgatttagtatcaaagctgctgtattctcgaggattactaattgatcttctaatcaaatctaatgttagtcgatatgcagagtttaaaaatattaccaggattcttgcatttcgagaaggacgagtggaacaggttccgtgttccagagcagatgtctttaatagcaaacaacttactatggtagaaaagcgaatgctaatgaaatttcttacattttgtatggaatatgagaaatatcctgatgaatataaaggatatgaagagatcacattttatgaatatttaaagactcaaaaattaacccccaacctccaatatattgtcatgcattcaattgcaatgacatcagagacagccagcagcaccatagatggtctcaaagctaccaaaaactttcttcactgtcttgggcggtatggcaacactccatttttgtttcctttatatggccaaggagaactcccccagtgtttctgcaggatgtgtgctgtgtttggtggaatttattgtcttcgccattcagtacagtgccttgtagtggacaaagaatccagaaaatgtaaagcaattatagatcagtttggtcagagaataatctctgagcatttcctcgtggaggacagttactttcctgagaacatgtgctcacgtgtgcaatacaggcagatctccagggcagtgctgattacagatagatctgtcctaaaaacagattcagatcaacagatttccattttgacagtgccagcagaggaaccaggaacttttgctgttcgggtcattgagttatgttcttcaacgatgacatgcatgaaaggcacctatttggttcatttgacttgcacatcttctaaaacagcaagagaagatttagaatcagttgtgcagaaattgtttgttccatatactgaaatggagatagaaaatgaacaagtagaaaagccaagaattctgtgggctctttacttcaatatgagagattcgtcagacatcagcaggagctgttataatgatttaccatccaacgtttatgtctgctctggcccagattgtggtttaggaaatgataatgcagtcaaacaggctgaaacacttttccaggaaatctgccccaatgaagatttctgtccccctccaccaaatcctgaagacattatccttgatggagacagtttacagccagaggcttcagaatccagtgccataccagaggctaactcggagactttcaaggaaagcacaaaccttggaaacctagaggagtcctctgaataatggatatacaccaaactggatacccaactttggaaattctgactggtctcagagtctacttgatagaaggactgtttgagaaatgttagaaagcagcagcaattataaggcaaaataggtaatagaaatccaaaaggggattttccttatagaggacattccaagaacacacaacacttataaagcacattgacttgctcattttaaataccaaacttgtgtgactagcagatgaaaattataaatcaattgattctcaggaatgtaactgtggatatgaaagtgatcctatgcattgttaataattccatggtcttaggacaattttgcttaccactttggatctttgtttgaaagccacattttcagaaccagctcatgtattttctttggttatttgaattttattttctttatggacaagagcatcataacataatgataaaaacatatagaaaaactaaagtatcatgatctagatagaagcctgtatttggaatacaggtttgttttgctttctatgttgagaagcattgaaaatgctaatataaaggtgtttagacatttttacgaataagtcagtagtgttttttagtatcagtagtgatatttgtttgtaaattatttacatattgggaaaggtcaataatgaagaaatgaaagaatggaaggaaaggtgtggataggctcattggtatttgaatattctgtctgtcaagtaactagagtattaggctaattgtctacagacctaatttaatcctggctgtcctactgatgatatttggtaaattgtttaacttctgagcctacgtttctccatatataaagtggaaatagtattactatgcctactatatgagaatggttatgaagacaatgcaatgccatgtttagaatcggtttgccagaagaaaattgttttagaattttcccattgacttgatgaatctcaaaagtctcacgcaggaaataattgcttgctgtcagtcaacttccaaacaaaatagatcacagtgtttttattgcattaagctttttaaatgaaaatttcttttttaaagtagtattttatagtcttacagaccagtaaaaatagtaacaagtagaattgtggttttgaaatattactaaggaaaacactctataaattgttttattccttttctggtaggtaaacctgcaaccaccaaggactccaaattgtgtatg

SEQ ID NO: 8941 - protein, 653 aa, Homo sapiens; identical to SEQ ID NO: 1283

SEQ ID NO: 8942 - DNA, 2818 bp, Homo sapiens
cgtcaagatggcggatactctcccttcggagtttgatgtgatcgtaatagggacgggtttgcctgaatccatcattgcagctgcatgttcaagaagtggccggagagttctgcatgttgattcaagaagctactatggaggaaactgggccagttttagcttttcaggactattgtcctggctaaaggaataccaggaaaacagtgacattgtaagtgacagtccagtgtggcaagaccagatccttgaaaatgaagaagccattgctcttagcaggaaggacaaaactattcaacatgtggaagtattttgttatgccaggtccacgctgcttttatgagctgtaacactcaccgcgaagatctgcagcttcactcctgcgcccaccgagaccacaagcccaccgggaggaacgaacaactccagacgctctgccttaagagctgtaacattcaccgcgaaggtctgcagcttcactcctgagccagcgagaccacgaacccaccagaaggaagaaactccgaacacatctgaacatcagaaggaacaaactccagacgtgccaccttaagagctgtaacactcaccgcgcgggtccgcggcttcattctttaagtcagtgagaccaagaacccaccaattccggacacaccgatagcattctaatattttacatttgattgcaaggaggactaggcgagaattcaaatggattagtgcaaacccattaccactgcttggaaaatacgtcaaagtatttgggcaatataattctaatatatgtattctaatataaatatatagggtgtatttatatattatgtattctaatataaatatataggatagttattttttgattaccatgacttatttaaaaagtattctgaagtattattcaacttaaaggttttcatgatcatttcaacattaaatttaatacgttgggtattgcaaaacaggctaaagactaaaatgtaaattgtagtaattattctatcataggctaggttcaaacatcatagactgtaaagaactatccagattgttttatcagagctttgttttcctgattcttccttacaataagtgggctacttaatattttggacctaaaatatttttgctacacaaagattgtttttcattgaagtgattttttgtgattacacaatcgagttatggaagggaaatgaaaaaggactagtgtttattggatattatctttgtggcaactgctgtaacctgttgctttacatattaatttcatttattctgtgcagcagtcatgtgcatgagctataggtacatcttactgacaaacagaagctcaaggaatgctagagatagcagagccaaatttgaacttgtgtttttctaactcaaaaacgtgtgctatttccagtgtatcatgttgtatttcagtcatcaggtaaacacatgtatgcacatcaagggaaccaaccgttccaccaagtgaattaagtatttcctttgtgaagactagcacctaagaaagtgcatttacttctttaatttactggaatactatatagtattgtaatgtagttatatctgtaatgagaaattaaagtgcctaactcccagtgttaggaagctatgggaagaatccaatattctttagttgttgagaccagtttatatgccatgggattttttaaattgatacataataattgtatatattcatgggatacaatatgttttggtacatataaacattgtagaatgatcaaattaggctaattagcatatccatcaccttaaacctttattattttttgtgagaacattcagaatcatctcttttagctatttgaaatatgcaatgcattattgttagctatactcaccttactgtgtgatagagtaccagaatgtattcctcctacctaactgtaacattatacccattgaccaacctctcctcatcttcccctccctcctgttctccccagtctctggtaaccactatcaagttttttagatttcacatatgagtgagatcattcagtatttttctttctgttctcagcttatttcacttaatataatgttctccaggctcatccatgttgtcacaaatgacaggatttaattttttttatggctgtgcagtattctattgtgtatatatgccacattttccttgttaattcatttgttgatgggcatttaagttgattccatattttcgcaattgtgaatagtgctccaataaacatgggagtgcagatgtctcttcaacctactgatttcatttcctttggctatatacccagtagtgagggtgaagattgctggatcatatgatagatttatttttaattttttgaggaacttctgtactgttttccataatggctgtactgatttgcattcctaccaacagtgtgtgagagttcttctttcttaccatgtaatagtttcatagtttatgtggggaaataaaagtagctattgtttctagttttagatcttgaacagactataaaaaggtgcaatatattaattcacacttaaatcacacaaactcaagttattcttaggtaaaatatcgttgcttgttaattgcataaagtcatctagtttctttagtgagaagagattttatctttctaaaatattaacaatagctttatacattttctgtcctattttctgcattgtactgaacgttgtttccctttttctggtataatattaaagcaggatgaaaacttatttgttaccttcaaatgaaccaactctaatgtattcataccaaaataaagatttttttgcaataggaatctaa

SEQ ID NO: 8943 - protein, 110 aa, Homo sapiens
MADTLPSEFDVIVIGTGLPESIIAAACSRSGRRVLHVDSRSYYGGNWASFSFSGLLSWLKEYQENSDIVSDSPVWQDQILENEEAIALSRKDKTIQHVEVFCYARSTLLL

SEQ ID NO: 8944 - DNA, 362 bp, Homo sapiens
atcattgcagctgcatgttcaagaagtggccggagagttctgcatgttgattcaagaagctactatggaggaaactgggccagttttagcttttcaggactattgtcctggctaaaggaataccaggaaaacagtgacattgtaagtgacagtccagtgtggcaagaccagatccttgaaaatgaagaagccattgctcttagcaggaaggacaaaactattcaacatgtggaagtattttgttatgccaggtatgaaaagtatttactgcaggtaaactaaattaatgactttttcactcttctttagaagaagccaacaataaagatttatgtggcattggttgctacaagtcacgttaa

SEQ ID NO: 8945 - protein, 31 aa, Homo sapiens
MKKPLLLAGRTKLFNMWKYFVMPGMKSIYCR

SEQ ID NO: 8946 - DNA, 678 bp, Homo sapiens
aatagtcacatgacacgtttcccgtcaagatggcggatactctcccttcggagtttgatgtgatcgtaatagggacgggtttgcctgaatccatcattgcagctgcatgttcaagaagtggccggagagttctgcatgttgattcgtaagtttatcaacgatagcatttaatatttcctaaatatctctatacaggattaaaatttacataaacacatatatgtctgtacgtatgtacatgtatgtgtatatcatacataaacttaagttagaagaaagatcggagttgtttaattttaaccactaatatgtgaaatatatagcatacaagttttactattttgtgaaatagtgatctttgagaataaaccaaatgcatcattttatttttctcatgagtgattttgtttaaaataacaagtaattctccaagaggcttggaaacctcatgcctgccccttttcctacatatgtgtgtgggtatatacaacctatatatgctattgtattttaggcttcatatttgatggttgtaaaagtcagccaatagattttgagcattattttcttaaacttcatcaaaatttaaacttaggaagtcttaactaggaaaaatatctacaattatgtttttccctttttttcttaaatgtgatgataagcaggaggttgatggaa

SEQ ID NO: 8947 - protein, 39 aa, Homo sapiens
MADTLPSEFDVIVIGTGLPESIIAAACSRSGRRVLHVDS

SEQ ID NO: 8948 - DNA, 739 bp, Homo sapiens
ttctccttcaccttccgccgtgattgcaagtttcctgaggcctccccagccatgctgaactggttctgcaggatatacacgaagtatggcaccaacatctgcttctggtgaaggcttcatgaagcttccacccatgacagaaggcgaagaactgttgccagcatcatgctacaagcctgaagggaaggtctactgacagagaaggacagagaccagggaaacacagaaaaggagagacaaagccttgacataccaaaccagtgcctggcctacctatggacttctcatgccaacttgggagacatattatcaagactgaatcagagagttgacagcataccaggaagtgtcactgtatagtttggaagatggaaatcatactacttttttcccatgtaagcactccaggaaattaacctccaaatacaactgaggaataggcaccgttatggcttttttacagatcaataaactgatgaaatacggtgaagctatgtaagtagaccaaagatgtacaagaagacacacattgagcagaaaataaatttaagcctggcttctcaactctttatttaaccagagacggttctatctcaaacatgaggttctatatgaaagcaggagggaattaggaagtaaaatctggtgagcatttttcctgaaatattacagctgtcattctcagggccctcgtcctgagatagtggcaggttaagatattaaatttttatttctctgg

SEQ ID NO: 8949 - protein, 36 aa, Homo sapiens
MAPTSASGEGFMKLPPMTEGEELLPASCYKPEGKVY

SEQ ID NO: 8950 - DNA, 2388 bp, Homo sapiens
actttctttggctgcagtgacacagatgtttgggtgggagggggtgcggagggtggcggaagcatgctggttcaatgcttgagaaacagtgctgcacccaacagactgaatgtcatgaattctttgtcagctccccctcagaccctccaggctttccctttgtctgctaagggatggaaacagaacagatacattgaagccggtagactgaccagctagattgacccaaattcattcaggaaatgcaaaagcctgctggctcctgggattagctggctggtgtttgaatcgctacccatctgtacatttccttctagtccagtgcagccccagcttgctacatctgctcacctcagcagcttgctttccaagacaagataatttgagaagagtctagttgtgagaaagcaatgtccaatgctagggaaactttgtggcaagcccgaagagaaatttggcccttatgaataacatacagaggacagctttctcttctgaggagtcagaagttcagttcgcccaacatggaatgacttgaggtttcccccaagaaagagcagctgagtccttgcatcttgtggcagctggtgtgcccagcactgagtctgtaggagctgaagccagcccggacccttctcatgggcagtgcccacctgtgctgaagtcctgcagcggtggcggtgtgaggagctgtgaaattagttgtaactgaaaatgtctgacggtctggataatgaagagaaacccccggctcctccactgaggatgaatagtaacaaccgggattcttcagcactcaaccacagctccaaaccacttcccatggcccctgaagagaagaataagaaagccaggcttcgctctatcttcccaggaggaggggataaaaccaataagaagaaggagaaagagcgcccagagatctctcttccttcagactttgagcatacgattcatgtggggtttgatgcagtcaccggggaattcactggaattccagagcaatgggcacgattactccaaacttccaacataacaaaattggaacagaagaagaacccacaagctgttctagatgttctcaaattctatgattccaaagaaacagtcaacaaccagaaatacatgagctttacatcaggagataaaagtgcacatggatacatagcagcccatccttcgagtacaaaaacagcatctgagcctccattggcccctcctgtgtctgaagaagaagatgaagaggaagaagaagaagaagatgaaaatgagccaccaccagttatcgcaccaagaccagagcatacaaaatcaatctatactcgttctgtggttgaatccattgcttcaccagcagtaccaaataaagaggtcacaccaccctctgctgaaaatgccaattccagtactttgtacaggaacacagatcggcaaagaaaaaaatccaagatgacagatgaggagatcttagagaagctaagaagcattgtgagtgttggggacccaaagaaaaaatacacaagatttgaaaaaattggtcaaggggcatcaggtactgtttatacagcactagacattgcaacaggacaagaggtggccataaagcagatgaaccttcaacagcaacccaagaaggaattaattattaatgaaattctggtcatgagggaaaataagaaccctaatattgttaattatttagatagctacttggtgggtgatgaactatgggtagtcatggaatacttggctggtggctctctgactgatgtggtcacagagacctgtatggatgaaggacagatagcagctgtctgcagagagtgcctgcaagctttggatttcctgcactcaaaccaggtgatccatagagatataaagagtgacaatattcttctcgggatggatggctctgttaaattgactgactttgggttctgtgcccagatcactcctgagcaaagtaaacgaagcactatggtgggaaccccatattggatggcacctgaggtggtgactcgaaaagcttatggtccgaaagttgatatctggtctcttggaattatggcaattgaaatggtggaaggtgaacccccttaccttaatgaaaatccactcagggcattgtatctgatagccactaatggaactccagagctccagaatcctgagagactgtcagctgtattccgtgactttttaaatcgctgtcttgagatggatgtggataggcgaggatctgccaaggagcttttgcagcctactccctgaaagaaaaacctgttcctgttgcttctgaactccttccagagacagagctgcacccaggcaaaaactatcccaccctaactcagatcatacctggaataaacctatttggagaaactg

SEQ ID NO: 8951 - protein, 518 aa, Homo sapiens
MSDGLDNEEKPPAPPLRMNSNNRDSSALNHSSKPLPMAPEEKNKKARLRSIFPGGGDKTNKKKEKERPEISLPSDFEHTIHVGFDAVTGEFTGIPEQWARLLQTSNITKLEQKKNPQAVLDVLKFYDSKETVNNQKYMSFTSGDKSAHGYIAAHPSSTKTASEPPLAPPVSEEEDEEEEEEEDENEPPPVIAPRPEHTKSIYTRSVVESIASPAVPNKEVTPPSAENANSSTLYRNTDRQRKKSKMTDEEILEKLRSIVSVGDPKKKYTRFEKIGQGASGTVYTALDIATGQEVAIKQMNLQQQPKKELIINEILVMRENKNPNIVNYLDSYLVGDELWVVMEYLAGGSLTDVVTETCMDEGQIAAVCRECLQALDFLHSNQVIHRDIKSDNILLGMDGSVKLTDFGFCAQITPEQSKRSTMVGTPYWMAPEVVTRKAYGPKVDIWSLGIMAIEMVEGEPPYLNENPLRALYLIATNGTPELQNPERLSAVFRDFLNRCLEMDVDRRGSAKELLQPTP

SEQ ID NO: 8952 - DNA, 3350 bp, Homo sapiens
gaggtagaggaaaggtcttgacggggtggctggatccgtggcagaatccagttccagattctagacttgagggttctgggctgttggtctgtagaagcgaaggagagaaggactcaaatccaggccaagtgtatggctgtctgaggtattggaacagaaggaggtccattcctgttggtgacaacaccgtggccctgttctgggatgagcaaggtgtaaaggtttcccccaagaaagagcagctgagtccttgcatcttgtggcagctggtgtgcccagcactgagtctgtaggagctgaagccagcccggacccttctcatgggcagtgcccacctgtgctgaagtcctgcagcggtggcggtgtgaggagctgtgaaattagttgtaactgaaaatgtctgacggtctggataatgaagagaaacccccggctcctccactgaggatgaatagtaacaaccgggattcttcagcactcaaccacagctccaaaccacttcccatggcccctgaagagaagaataagaaagccaggcttcgctctatcttcccaggaggaggggataaaaccaataagaagaaggagaaagagcgcccagagatctctcttccttcagactttgagcatacgattcatgtggggtttgatgcagtcaccggggaattcactggaattccagagcaatgggcacgattactccaaacttccaacataacaaaattggaacagaagaagaacccacaagctgttctagatgttctcaaattctatgattccaaagaaacagtcaacaaccagaaatacatgagctttacatcaggagataaaagtgcacatggatacatagcagcccatccttcgagtacaaaaacagcatctgagcctccattggcccctcctgtgtctgaagaagaagatgaagaggaagaagaagaagaagatgaaaatgagccaccaccagttatcgcaccaagaccagagcatacaaaatcaatctatactcgttctgtggttgaatccattgcttcaccagcagtaccaaataaagaggtcacaccaccctctgctgaaaatgccaattccagtactttgtacaggaacacagatcggcaaagaaaaaaatccaagatgacagatgaggagatcttagagaagctaagaagcattgtgagtgttggggacccaaagaaaaaatacacaagatttgaaaaaattggtcaaggggcatcaggtactgtttatacagcactagacattgcaacaggacaagaggtggccataaagcagatgaaccttcaacagcaacccaagaaggaattaattattaatgaaattctggtcatgagggaaaataagaaccctaatattgttaattatttagatagctacttggtgggtgatgaactatgggtagtcatggaatacttggctggtggctctctgactgatgtggtcacagagacctgtatggatgaaggacagatagcagctgtctgcagagagtgcctgcaagctttggatttcctgcactcaaaccaggtgatccatagagatataaagagtgacaatattcttctcgggatggatggctctgttaaattgactgactttgggttctgtgcccagatcactcctgagcaaagtaaacgaagcactatggtgggaaccccatattggatggcacctgaggtggtgactcgaaaagcttatggtccgaaagttgatatctggtctcttggaattatggcaattgaaatggtggaaggtgaacccccttaccttaatgaaaatccactcagggcattgtatctgatagccactaatggaactccagagctccagaatcctgagagactgtcagctgtattccgtgactttttaaatcgctgtcttgagatggatgtggataggcgaggatctgccaaggagcttttgcagcatccatttttaaaattagccaagcctctctccagcctgactcctctgattatcgctgcaaaggaagcaattaagaacagcagccgctaagactgcaagccttacacctcaccatctccctcatgagtaagactgaaataaaactctgctgcaggaaagatggaagaaaagacagtcaaatggggtgggggttctttacctttcaaatgaatagaaacttcttataagcctttttcctactccctcagattatgtaatttatttgtaagcctgaatcgcagcccaaacagggcagcaatgttgaagtgaccataaagtggtcacttccaccgtgaagcgaaagagccagtagtgaatcccctcattttgtgcattcactttgaagaaaaaggtttctcaaagatgcacactccctcttcatagtgttgtgtttgtttttaagttagagagtagtccctcttgcattcaaacctccttcaaaactccttacccaatgtgatgtttttcacttgcattgtcattagatgtccagaaaaaaaaaagatgtcaaaatgtttttctaaaaaaagaaagcaaaaaaagcaaggcaaaaaaaaaaaaaaaaacaaacaaaaacaaaaacaaaacaaaaacaagcaaacaaaaaataccagagcaagtactgtgtgaacatgtggaagtccatgccctaatagagttgcaattttttattcttcttctatagtggtggcttggtttgtgtacctatttttctgcatttgtattggaaaaggtttcttttaagacattttccaaaagtggagaggaatatgtgtgttcaggaagggctttcaaaaaactgtatatctaaataaagctcaaacggtgaaatcctgtcacattttcacaatgatgcttaaaagataattgagtaaaccaggttgttaatctccttaatacctgaaagaggacacactgaaactgaaactgtgacatcctgctaggtgagttcaggttctgaacctaggaaatcctcataggagaaaccacatttaaacaaagatgggactttctctgagagccaaaaccagataaatgtagaatactgaaatccttgttggacattaagtaaacaaagataatgatacctaaattaatcctctcttgtgcttatgaaacatatgcactgtaaaataggcataccaggaggaaatagatacattaatcatcatttacttatgatacaaattatttattttgacaatttataacgtttaaaaaagttttttaaagatctagagaaaggtgatatagtaaacattcaactctgtaagaaatgggaggtcagtgaaggctacatcccaatcaatatttggctctaagtacctcttcccatttttcctatgtatcacctatttctgtttcggaat

SEQ ID NO: 8953 - protein, 544 aa, Homo sapiens; identical to SEQ ID NO: 1285

SEQ ID NO: 8954 - DNA, 1145 bp, Homo sapiens
gcagactcaaatccaggccaagtgtatggctgtctgaggtattggaacagaaggaggtccattcctgttggtgacaacaccgtggccctgttctgggatgagcaaggtgtaaaggagctgtgaaattagttgtaactgaaaatgtctgacggtctggataatgaagagaaacccccggctcctccactgaggatgaatagtaacaaccgggattcttcagcactcaaccacagctccaaaccacttcccatggcccctgaagagaagaataagaaagccaggcttcgctctatcttcccaggaggaggggataaaagtaaagtatcagtggccgggcattgaaaatgggctagtttattctttcattttcactttctttcttaggtagttgtttcttgaggattgactgttcagggcctgccggccctttacatctacgtcttcagaggttgcattttgtcagagaataatgtttgattgatttactgtgggctgacagaaaatacatttacactatgtttgcttttcacataaaattaaattcatagtgttaagccaagggtaatcatagcaacagtactgtcttgaatatatcaacagtgactttctttctgataatgtagagtagaatttacaataatccctccctaactataagttgttctttttggaaatttgggtataggtaggtttacttctgtatacctttttgataactgaaaattttgaattcagtatatgagaatcagtccacgttgccacaatattgtctctctgactatattgtaagtgggaaggcatttctgagtcatttgtttccattatcattcttcaacctgttttcccctagacagccccatgtgtactgagtagcacaccaatatattataatttatccttctggtgtttgtaataccatttggtgcttaaatgtcatatgctaatgctttgtgacgtgcagggatatgaaatctctagtaagtaactttcaggttacattaattagcataaagctgaaacatggcttctacagatatgaagcaagtacaagggcactgacaccatagaaacttgtcagaagggcaagaagggtgatgtctttagaagagaaacaggacattctcaatctacttcttcaaggtaaa

SEQ ID NO: 8955 - protein, 66 aa, Homo sapiens
MSDGLDNEEKPPAPPLRMNSNNRDSSALNHSSKPLPMAPEEKNKKARLRSIFPGGGDKSKVSVAGH

SEQ ID NO: 8956 - DNA, 540 bp, Homo sapiens
gactttgagcatacgattcatgtggggtttgatgcagtcaccggggaattcactggaattccagagcaatgggcacgattactccaaacttccaacataacaaaattggaacagaagaagaacccacaagctgttctagatgttctcaaattctatgattccaaagaaacagtcaacaaccagaaatacatgagctttacatcaggagataaaagtgcacatggatacatagcagcccatccttcggtaagtgaaaaattgaaaactgtttcacatgattggtgtttccaaagatttaagagaatataactgcacagatccagtttttagatataaagtcttttaaaaacaattttaaggtataattcagtttatataaaattcacctattttcaggtaaacagttcaatgagttttggtaaatgtatatacctatgctaccatcaccacaattgagttttagaacaagtccatcaccccagtaaaatccttcatacctacttacagttaactccacccaccccaccctagtcacaggca

SEQ ID NO: 8957 - protein, 39 aa, Homo sapiens
MSFTSGDKSAHGYIAAHPSVSEKLKTVSHDWCFQRFKRI

SEQ ID NO: 8958 - DNA, 8192 bp, Homo sapiens
cgccgcctgtgcagccgctgccgccgccgccgccgccgccgccgccgccgccgccgccgccgccgctgccgccccggctgccgcgccgcgccgctgcctctgccccggccgcccccgccgccgctgccgccgccggcccgcagccagccaggcgggcggcccagcccgcctgagcccgcagcggctgccgccgcagcgtcgggtcgctgggtgcgcgggctaccgcggaccgagcggacccgagtgggcgaccaggcgcttgcccgcccagtgccactgccgccgcttcctcgccggagcacaggaccagacacctccagcgcccgctgctgctgccgatgcggcccggacacttttagctgggcgggagggctggagagccgggggccgccgagaaccgccagcgagctgtgccgagagccgcgccgacccgctgcgatcagggacaggcgcccgcccgccgccgccgcctggccgctatggatctattcgactttttcagagactgggacttggagcagcagtgtcactatgaacaagaccgtagtgcacttaaaaaaagggaatgggagcggaggaatcaagaagtccagcaagaagacgatctcttttcttcaggctttgatctttttggggagccatacaagacaaacaaaggtgatgcacttgccaaccgagtccagaacacgcttggaaactatgatgaaatgaagaatttgctaactaaccattctaatcagaatcacctagtgggaattccaaagaattctgtgccccagaatcccaacaacaaaaatgaaccaagcttttttccagaacaaaagaacagaataattccacctcaccaggataatacccatccttcagcaccaatgcctccaccttctgttgtgatactgaattcaactctaatacacagcaacagaaaatcaaaacctgagtggtcacgtgatagtcataaccctagcactgtactggcaagccaggccagtggtcagccaaacaagatgcagactttgacacaggaccagtctcaagccaaactggaagacttctttgtctacccagctgaacagccccagattggagaagttgaagagtcaaacccatctgcaaaggaagacagtaaccctaattctagtggagaagatgctttcaaagaaatctttcaatccaattcaccggaagaatctgaattcgccgtgcaagcgcctgggtctcccctagtggcttcctctttattagctcctagcagtggcctttcagttcaaaacttcccaccagggctttactgcaaaacaagcatggggcagcaaaagccaactgcatacgtcagacccatggatggccaggaccaggcaccggacatctcaccaacactgaaaccttcaattgaatttgagaacagctttgggaatctgtcatttggaacactcttggatggaaaacccagtgcagccagttcaaagactaaactgccaaagttcaccatcctccaaacaagtgaagtaagccttcccagtgatccaagctgtgttgaagaaatcttgcgggagatgacccattcctggcctactcctctcacttccatgcatactgctggacactctgagcagagcaccttttccatcccaggacaggaatcgcagcatctgaccccaggattcaccttacaaaagtggaatgacccaaccaccagagcttctacaaagatgcttgaggatgacctgaagctgagcagtgatgaagatgaccttgagcctgtgaagaccttgaccactcagtgcactgccactgagctctaccaggctgttgaaaaggcaaaacctaggaataatcctgtgaacccacccttggccactccccagcccccacctgcagtgcaagccagcgggggttctggcagctccagcgaatcggagagcagctctgagtcggattcagacactgaaagtagcaccactgacagcgaatctaatgaggcacctcgtgtggcaactccagagcctgagccaccctcaaccaacaagtggcaactggataaatggcttaacaaagtgacatcccagaacaagtcttttatttgtggccaaaatgaaacacccatggagactatttctctgcctcctccaatcatccaaccaatggaagtccagatgaaagtgaagacgaatgccagtcaggtcccagctgaacccaaagaaaggcctctcctcagtctcattagggagaaagcccgtccacggcccactcagaaaattccagaaacaaaggctttgaagcataagttgtcaacaactagtgagacagtgtctcaaaggacaattgggaaaaaacagcccaaaaaagttgagaagaacaccagcactgacgagtttacctggcccaaaccaaatattaccagcagcactcccaaagaaaaagaaagtgtggagcttcatgacccaccaagaggccgcaacaaagccactgcccacaaaccagcccctaggaaagaaccaagacctaacatccctttggctcccgagaagaagaagtacagagggcctggcaagattgtgccaaagtctcgggaattcattgaaacagattcatctacatctgactccaacacagatcaggaagagaccctgcaaatcaaagtcctgcctccgtgcattatttctggaggtaatactgccaaatccaaggaaatctgtggtgccagcctgaccctcagcaccttaatgagtagcagtggcagcaacaacaacttatccatcagtaatgaagagccaacattttcacctattcctgtcatgcaaactgaaatcctgtcccctctgcgagatcatgagaacctgaaaaacctctgggtgaagattgaccttgacttactctctagagtacctggccacagctcactccatgcagcacctgccaagccagaccacaaggagactgccacaaaacccaagcgtcagacagctgtcacagctgtggagaaaccagcccctaagggcaaacgtaagcacaagccaatagaagttgcagagaagatccctgagaagaagcagcgcctggaggaggccacaactatctgcttgctccctccttgcatctcaccagccccaccccacaagcctcccaacactagagaaaataattcatccaggagagcaaatagaagaaaggaagaaaaactatttcctcctccactttccccactgccagaggaccctccacgccgcagaaatgtcagtggcaataatggtccctttggtcaagacaaaaacatcgccatgactggacaaatcacatctaccaaacctaagagaactgaaggcaaattctgtgctactttcaaagggatatcggtaaatgagggagacactccaaaaaaggcatcctctgccaccatcactgtcaccaatactgctattgccactgctactgtcactgctactgccattgtcaccaccactgtcacagctactgccaccgccacggccaccaccacaactactaccactaccatttccaccatcacctctaccatcactactggcctcatggatagcagtcacctggagatgacgtcctgggcggctctgccccttctatccagcagcagcactaatgtccggagacccaagctcacttttgatgactcggttcacaatgctgattattacatgcaagaagctaagaagctgaagcacaaagctgatgcactgttcgagaaatttggcaaagctgtgaattatgctgatgccgccctctccttcactgaatgtggcaatgccatggaacgcgaccctctggaagcaaagtccccatacaccatgtactctgagactgtggagctcctcaggtatgcaatgaggctgaagaactttgcaagtcccttggcttcggatggggacaaaaagctagcagtactatgctaccgatgtttatcactcctctatttgagaatgtttaagctgaagaaggaccatgctatgaagtactccagatcactgatggaatattttaagcaaaatgcttcaaaagtcgcacagataccctctccatgggtaagcaatggaaagaacactccatccccagtgtctctcaacaacgtctcccccatcaacgcaatggggaactgtaacaatggcccagtcaccattccccagcgcattcaccacatggctgccagccacgtcaacatcactagcaatgtgttacggggctatgaacactgggatatggccgacaaactgacaagagaaaacaaagaattctttggtgatctggacacgctgatggggcctctgacccagcacagcagcatgaccaatcttgtccgctacgttcgccaaggactgtgttggctgcgcatcgatgcccacttgttgtagtgggtgttctcagatctctagcatcacgacccatcactctacctctaccagcgcactgatggtcactggtggaactccactcactggggaacgttctctttggttatgtttgtttttatgcttcttttgttatctgtaaaaaacagaagtcattgtaagttgacactacaacttaagggcagtgtacgttttattacttagtcattttttttcttttagcatttgatatgcatttctcagattccaccatctttttgtgctttatggaatgacagtccctacaatattgttttaagcccacactacccaaaacaaagaatgggaagcacttgtgataaagacaggctcctgagaaatgcaacaagtggtcttacatatacatgagaacttagacacaagggaccatcccccaaactctactcttatacccagaaaagaacatatttcagaatctgtcaaacttttgtgtatcccacagattcaatcttcaggtgagaattttcattgtcaaaacccactggttagatgttgtagcaacatcataaaatcaagagtatcaagaaaataaatgagcatagcaatgctactcttaaaaagatgctatgccacacaaccagaggactttcttgttagcatccctttcctgattccctattttgttaattttaatgataagaagaaagggtgacatttattttgacaagttttaggcatcagctggcatcagtgtttttcaactccattatttgaagtgtaaatcctcacctggggttctctgtgtgcaaagctgtccttttgaagaacagtttggttgatgcatgccttagtagccaaaatgctacactctagacttacaagtgggagttaagagaggtctggaaagtgtccaacaaggaattcacacctctgcctcctttgcaacaacaacatttacacagttggtaagtgggtccataactggcaggatttttaaattgtattttgctcaaatctatgggaacaaaagtcaaggtatcactacctagaagtaatgatatacagttttcttcctagtggcttgaaaatctggacttcctcaattattattcacattttctctcttataggttttctgttttctactttcttttttctcttatctgtgtttccctttcctttgtttggctcattaacttttgactgaattacaattactccttttattaaagtccatattattgtgaatcatttccatgaaaatttctaagaaaactccaaactctctaaatagtagctaacttttatttttttaaaatgagtcgtggggtagtgcttcaccttgagatgctttgaaagagccctaaacattgggaaccattcacctaatttggagacatttctcactggttgtgactacccccttatgatccttcacattcattttatgtccctaaacatcacaatgtaaatatcatttttgatgttccagctcaccagaagattcttacacttggggtaaacactatccatgcattacttactggtaattacctgctggtatataattccatgtagcctttaatatgctgggttatcaaattctgttcactgagttatgaccagataaataatagatatgcacatgaaagatgcaaacttgtgtgattattaaagccagccatgcaggtccatgatagaaacagcaggtgatgactctgcactctcattgtcaaggttagatatatccccagttgcaaaacagccagacttgagctgtgctctggtcatctttgagtttaaggccttttgttgtataaggctgtggaagttgtactccaatggctgaagccatgttgttaatatggctgatgggagcatccctgcagctgaacccagcactttttatgctcccactgtggttgagctttatgtttacagtctcagcaacaacacttatgcatccaaacactcacaaatgaaacctgaaagaatcttttctgagcctcttaaaagaggaaaatgatgataacattaaagactctgaacacccaaggttggtgtcacatataaaaattaagctgatgactttgcagtgactcaagttgtctctttatcatggtttaccaggtagagtgcctggctattactatataatgaagcccactggcttgacttgtaagttcaacctaaaccacaatcctagaccatcatggatttaggagtagattcttcttgaaatcccacatccagaaactagacattagaatgttgaggcagtttcccagagaaacaagcatattgcctcatggatgaaagacttgtagttctagtttcagtgacttgttatatctacttacatacaacagggaggcaagaggattctctgtcatctctggtgactgagtgtaaaatatgtgccaagtctgcagcacagtgaccaaatctgacaatcgagctctggatcaccacttgattatgtagtagactcatttataaagcagcttaggaactaattaaacatggaggatgaattaccttcctatcccttgagataagacatctttcagtttcatgattaaggattgttgctgttttatagttactctgttcatcacagtgtaaatggtgatgcgtgtcgtaggtgtgcagctatttgagggactaagggatggagatattctgtcaaatgaatctcttcagtataccagtttgtgggagggatatgagacatgtggatggcagtgagagatcgtgcctctagatcttgatggaggcttggtgagacacacttaaataagcacgtggaggttagaatagagggcagagtaaaaggaagctccatctgagcaagtacaccaaatgatctcagccctgcaacttgacccaggtagggccaccactacgccttcacttgtcacccaagctccaaccacagagagtttgacaagtttgtgttatgatgttggcttggctttgtatttttaattaactttggatttttagtggttttgtcatataactgtctgagtttggtaggtaggattactttgaaaagggtttactagtgtggtcctccgggtagaatttagctgtaagcatgttgttagccagcctgtagactgttaattacttaataatctcattgggaaaatactagtagttttatatttggatgacataattggaaaagcagattagctgctactacttttaaaagacttaaggtcgggatgcctttttttccatgtaaggaaatgaaaagaccaaaatcttcaggcaaaaagcaagttgcaaaattagaaaccattggctaaaaatgtgttttgttgagtttccaaatggatgaattttcatttggacattacatcactaaattcattagattttgtctgcattggaaagatactcttctagcatatctttcccaaagatatctaatttggattctgtttcatgcaaatttgcatcccggaggttgaagttggagtttgaggttggaaaatatctttgaaggcagaatcagttgagttgtgagggtgaagcctcacatacttctcaacagacatgataaaattcacctgcatgagttggcaggtgggagaaccaaactggatcactgggtaagactactcagtaaagcaatgaactgcttgcttagagaagcatcactatccccattgagaaaaatgtgtggcaagatgatacagctacacagtatcaaatgaatgggtcaattcagcacccccaaatttaattctgtggggaaaaattattgagccagttgtcagtgttctgttacatgactggcagactaaattcttcatcgtt

SEQ ID NO: 8959 - protein, 1301 aa, Homo sapiens
MDLFDFFRDWDLEQQCHYEQDRSALKKREWERRNQEVQQEDDLFSSGFDLFGEPYKTNKGDALANRVQNTLGNYDEMKNLLTNHSNQNHLVGIPKNSVPQNPNNKNEPSFFPEQKNRIIPPHQDNTHPSAPMPPPSVVILNSTLIHSNRKSKPEWSRDSHNPSTVLASQASGQPNKMQTLTQDQSQAKLEDFFVYPAEQPQIGEVEESNPSAKEDSNPNSSGEDAFKEIFQSNSPEESEFAVQAPGSPLVASSLLAPSSGLSVQNFPPGLYCKTSMGQQKPTAYVRPMDGQDQAPDISPTLKPSIEFENSFGNLSFGTLLDGKPSAASSKTKLPKFTILQTSEVSLPSDPSCVEEILREMTHSWPTPLTSMHTAGHSEQSTFSIPGQESQHLTPGFTLQKWNDPTTRASTKMLEDDLKLSSDEDDLEPVKTLTTQCTATELYQAVEKAKPRNNPVNPPLATPQPPPAVQASGGSGSSSESESSSESDSDTESSTTDSESNEAPRVATPEPEPPSTNKWQLDKWLNKVTSQNKSFICGQNETPMETISLPPPIIQPMEVQMKVKTNASQVPAEPKERPLLSLIREKARPRPTQKIPETKALKHKLSTTSETVSQRTIGKKQPKKVEKNTSTDEFTWPKPNITSSTPKEKESVELHDPPRGRNKATAHKPAPRKEPRPNIPLAPEKKKYRGPGKIVPKSREFIETDSSTSDSNTDQEETLQIKVLPPCIISGGNTAKSKEICGASLTLSTLMSSSGSNNNLSISNEEPTFSPIPVMQTEILSPLRDHENLKNLWVKIDLDLLSRVPGHSSLHAAPAKPDHKETATKPKRQTAVTAVEKPAPKGKRKHKPIEVAEKIPEKKQRLEEATTICLLPPCISPAPPHKPPNTRENNSSRRANRRKEEKLFPPPLSPLPEDPPRRRNVSGNNGPFGQDKNIAMTGQITSTKPKRTEGKFCATFKGISVNEGDTPKKASSATITVTNTAIATATVTATAIVTTTVTATATATATTTTTTTTISTITSTITTGLMDSSHLEMTSWAALPLLSSSSTNVRRPKLTFDDSVHNADYYMQEAKKLKHKADALFEKFGKAVNYADAALSFTECGNAMERDPLEAKSPYTMYSETVELLRYAMRLKNFASPLASDGDKKLAVLCYRCLSLLYLRMFKLKKDHAMKYSRSLMEYFKQNASKVAQIPSPWVSNGKNTPSPVSLNNVSPINAMGNCNNGPVTIPQRIHHMAASHVNITSNVLRGYEHWDMADKLTRENKEFFGDLDTLMGPLTQHSSMTNLVRYVRQGLCWLRIDAHLL

SEQ ID NO: 8960 - DNA, 7601 bp, Homo sapiens
cggccgcccccgccgccgctgccgccgccggcccgcagccagccaggcgggcggcccagcccgcctgagcccgcagcggctgccgccgcagcgtcgggtcgctgggtgcgcgggctaccgcggaccgagcggacccgagtgggcgaccaggcgcttgcccgcccagtgccactgccgccgcttcctcgccggagcacaggaccagacacctccagcgcccgctgctgctgccgatgcggcccggacacttttagctgggcgggagggctggagagccgggggccgccgagaaccgccagcgagctgtgccgagagccgcgccgacccgctgcgatcagggacaggcgcccgcccgccgccgccgcctggccgctatggatctattcgactttttcagagactgggacttggagcagcagtgtcactatgaacaagaccgtagtgcacttaaaaaaagggaatgggagcggaggaatcaagaagtccagcaagaagacgatctcttttcttcaggctttgatctttttggggagccatacaagacaaacaaaggtgatgcacttgccaaccgagtccagaacacgcttggaaactatgatgaaatgaagaatttgctaactaaccattctaatcagaatcacctagtgggaattccaaagaattctgtgccccagaatcccaacaacaaaaatgaaccaagcttttttccagaacaaaagaacagaataattccacctcaccaggataatacccatccttcagcaccaatgcctccaccttctgttgtgatactgaattcaactctaatacacagcaacagaaaatcaaaacctgagtggtcacgtgatagtcataaccctagcactgtactggcaagccaggccagtggtcagccaaacaagatgcagactttgacacaggaccagtctcaagccaaactggaagacttctttgtctacccagctgaacagccccagattggagaagttgaagagtcaaacccatctgcaaaggaagacagtaaccctaattctagtggagaagatgctttcaaagaaatctttcaatccaattcaccggaagaatctgaattcgccgtgcaagcgcctgggtctcccctagtggcttcctctttattagctcctagcagtggcctttcagttcaaaacttcccaccagggctttactgcaaaacaagcatggggcagcaaaagccaactgcatacgtcagacccatggatggccaggaccaggcaccggacatctcaccaacactgaaaccttcaattgaatttgagaacagctttgggaatctgtcatttggaacactcttggatggaaaacccagtgcagccagttcaaagactaaactgccaaagttcaccatcctccaaacaagtgaagtaagccttcccagtgatccaagctgtgttgaagaaatcttgcgggaatcgcagcatctgaccccaggattcaccttacaaaagtggaatgacccaaccaccagagcttctacaaagatgcttgaggatgacctgaagctgagcagtgatgaagatgaccttgagcctgtgaagaccttgaccactcagtgcactgccactgagctctaccaggctgttgaaaaggcaaaacctaggaataatcctgtgaacccacccttggccactccccagcccccacctgcagtgcaagccagcgggggttctggcagctccagcgaatcggagagcagctctgagtcggattcagacactgaaagtagcaccactgacagcgaatctaatgaggcacctcgtgtggcaactccagagcctgagccaccctcaaccaacaagtggcaactggataaatggcttaacaaagtgacatcccagaacaagtcttttatttgtggccaaaatgaaacacccatggagactatttctctgcctcctccaatcatccaaccaatggaagtccagatgaaagtgaagacgaatgccagtcaggtcccagctgaacccaaagaaaggcctctcctcagtctcattagggagaaagcccgtccacggcccactcagaaaattccagaaacaaaggctttgaagcataagttgtcaacaactagtgagacagtgtctcaaaggacaattgggaaaaaacagcccaaaaaagttgagaagaacaccagcactgacgagtttacctggcccaaaccaaatattaccagcagcactcccaaagaaaaagaaagtgtggagcttcatgacccaccaagaggccgcaacaaagccactgcccacaaaccagcccctaggaaagaaccaagacctaacatccctttggctcccgagaagaagaagtacagagggcctggcaagattgtgccaaagtctcgggaattcattgaaacagattcatctacatctgactccaacacagatcaggaagagaccctgcaaatcaaagtcctgcctccgtgcattatttctggaggtaatactgccaaatccaaggaaatctgtggtgccagcctgaccctcagcaccttaatgagtagcagtggcagcaacaacaacttatccatcagtaatgaagagccaacattttcacctattcctgtcatgcaaactgaaatcctgtcccctctgcgagatcatgagaacctgaaaaacctctgggtgaagattgaccttgacttactctctagagtacctggccacagctcactccatgcagcacctgccaagccagaccacaaggagactgccacaaaacccaagcgtcagacagctgtcacagctgtggagaaaccagcccctaagggcaaacgtaagcacaagccaatagaagttgcagagaagatccctgagaagaagcagcgcctggaggaggccacaactatctgcttgctccctccttgcatctcaccagccccaccccacaagcctcccaacactagagaaaataattcatccaggagagcaaatagaagaaaggaagaaaaactatttcctcctccactttccccactgccagaggaccctccacgccgcagaaatgtcagtggcaataatggtccctttggtcaagacaaaaacatcgccatgactggacaaatcacatctaccaaacctaagagaactgaaggcaaattctgtgctactttcaaagggatatcggtaaatgagggagacactccaaaaaaggcatcctctgccaccatcactgtcaccaatactgctattgccactgctactgtcactgctactgccattgtcaccaccactgtcacagctactgccaccgccacggccaccaccacaactactaccactaccatttccaccatcacctctaccatcactactggcctcatggatagcagtcacctggagatgacgtcctgggcggctctgccccttctatccagcagcagcactaatgtccggagacccaagctcacttttgatgactcggttcacaatgctgattattacatgcaagaagctaagaagctgaagcacaaagctgatgcactgttcgagaaatttggcaaagctgtgaattatgctgatgccgccctctccttcactgaatgtggcaatgccatggaacgcgaccctctggaagcaaagtccccatacaccatgtactctgagactgtggagctcctcaggtatgcaatgaggctgaagaactttgcaagtcccttggcttcggatggggacaaaaagctagcagtactatgctaccgatgtttatcactcctctatttgagaatgtttaagctgaagaaggaccatgctatgaagtactccagatcactgatggaatattttaagcaaaatgcttcaaaagtcgcacagataccctctccatgggtaagcaatggaaagaacactccatccccagtgtctctcaacaacgtctcccccatcaacgcaatggggaactgtaacaatggcccagtcaccattccccagcgcattcaccacatggctgccagccacgtcaacatcactagcaatgtgttacggggctatgaacactgggatatggccgacaaactgacaagagaaaacaaagaattctttggtgatctggacacgctgatggggcctctgacccagcacagcagcatgaccaatcttgtccgctacgttcgccaaggactgtgttggctgcgcatcgatgcccacttgttgtagtgggtgttctcagatctctagcatcacgacccatcactctacctctaccagcgcactgatggtcactggtggaactccactcactggggaacgttctctttggttatgtttgtttttatgcttcttttgttatctgtaaaaaacagaagtcattgtaagttgacactacaacttaagggcagtgtacgttttattacttagtcattttttttcttttagcatttgatatgcatttctcagattccaccatctttttgtgctttatggaatgacagtccctacaatattgttttaagcccacactacccaaaacaaagaatgggaagcacttgtgataaagacaggctcctgagaaatgcaacaagtggtcttacatatacatgagaacttagacacaagggaccatcccccaaactctactcttatacccagaaaagaacatatttcagaatctgtcaaacttttgtgtatcccacagattcaatcttcaggtgagaattttcattgtcaaaacccactggttagatgttgtagcaacatcataaaatcaagagtatcaagaaaataaatgagcatagcaatgctactcttaaaaagatgctatgccacacaaccagaggactttcttgttagcatccctttcctgattccctattttgttaattttaatgataagaagaaagggtgacatttattttgacaagttttaggcatcagctggcatcagtgtttttcaactccattatttgaagtgtaaatcctcacctggggttctctgtgtgcaaagctgtccttttgaagaacagtttggttgatgcatgccttagtagccaaaatgctacactctagacttacaagtgggagttaagagaggtctggaaagtgtccaacaaggaattcacacctctgcctcctttgcaacaacaacatttacacagttggtaagtgggtccataactggcaggatttttaaattgtattttgctcaaatctatgggaacaaaagtcaaggtatcactacctagaagtaatgatatacagttttcttcctagtggcttgaaaatctggacttcctcaattattattcacattttctctcttataggttttctgttttctactttcttttttctcttatctgtgtttccctttcctttgtttggctcattaacttttgactgaattacaattactccttttattaaagtccatattattgtgaatcatttccatgaaaatttctaagaaaactccaaactctctaaatagtagctaacttttatttttttaaaatgagtcgtggggtagtgcttcaccttgagatgctttgaaagagccctaaacattgggaaccattcacctaatttggagacatttctcactggttgtgactacccccttatgatccttcacattcattttatgtccctaaacatcacaatgtaaatatcatttttgatgttccagctcaccagaagattcttacacttggggtaaacactatccatgcattacttactggtaattacctgctggtatataattccatgtagcctttaatatgctgggttatcaaattctgttcactgagttatgaccagataaataatagatatgcacatgaaagatgcaaacttgtgtgattattaaagccagccatgcaggtccatgatagaaacagcaggtgatgactctgcactctcattgtcaaggttagatatatccccagttgcaaaacagccagacttgagctgtgctctggtcatctttgagtttaaggccttttgttgtataaggctgtggaagttgtactccaatggctgaagccatgttgttaatatggctgatgggagcatccctgcagctgaacccagcactttttatgctcccactgtggttgagctttatgtttacagtctcagcaacaacacttatgcatccaaacactcacaaatgaaacctgaaagaatcttttctgagcctcttaaaagaggaaaatgatgataacattaaagactctgaacacccaaggttggtgtcacatataaaaattaagctgatgactttgcagtgactcaagttgtctctttatcatggtttaccaggtagagtgcctggctattactatataatgaagcccactggcttgacttgtaagttcaacctaaaccacaatcctagaccatcatggatttaggagtagattcttcttgaaatcccacatccagaaactagacattagaatgttgaggcagtttcccagagaaacaagcatattgcctcatggatgaaagacttgtagttctagtttcagtgacttgttatatctacttacatacaacagggaggcaagaggattctctgtcatctctggtgactgagtgtaaaatatgtgccaagtctgcagcacagtgaccaaatctgacaatcgagctctggatcaccacttgattatgtagtagactcatttataaagcagcttaggaactaattaaacatggaggatgaattaccttcctatcccttgagataagacatctttcagtttcatgattaaggattgttgctgttttatagttactctgttcatcacagtgtaaatggtgatgcgtgtcgtaggtgtgcagctatttgagggactaagggatggagatattctgtcaaatgaatctcttcagtataccagtttgtgggagggatatgagacatgtggatggcagtgagagatcgtgcctctagatcttgatggaggcttggtgagacacacttaaataagcacgtggaggttagaatagagggcagagtaaaaggaagctccatctgagcaagtacaccaaatgatctcagccctgcaacttgacccaggtagggccaccactacgccttcacttgtcacccaagctccaaccacagagagtttgacaagtttgtgttatgatgttggcttggctttgtatttttaattaactttggatttttagtggttttgtcatataactgtctgagtttggtaggtaggattactttgaaaagggtttactagtgtggtcctccgggtagaatttagctgtaagcatgttgttagccagcctgtagactgttaattacttaataatctcattgggaaaatactagtagttttatatttggatgacataattggaaaagcagattagctgctactacttttaaaagacttaaggtcgggatgcctttttttccatgtaaggaaatgaaaagaccaaaatcttcaggcaaaaagcaagttgcaaaattagaaaccattggctaaaaatgtgttttgttgagtttccaaatggatgaattttcatttggacattacatcactaaattcattagattttgtctgcattggaaagatactcttctagcatatctttcccaaa

SEQ ID NO: 8961 - protein, 1272 aa, Homo sapiens
MDLFDFFRDWDLEQQCHYEQDRSALKKREWERRNQEVQQEDDLFSSGFDLFGEPYKTNKGDALANRVQNTLGNYDEMKNLLTNHSNQNHLVGIPKNSVPQNPNNKNEPSFFPEQKNRIIPPHQDNTHPSAPMPPPSVVILNSTLIHSNRKSKPEWSRDSHNPSTVLASQASGQPNKMQTLTQDQSQAKLEDFFVYPAEQPQIGEVEESNPSAKEDSNPNSSGEDAFKEIFQSNSPEESEFAVQAPGSPLVASSLLAPSSGLSVQNFPPGLYCKTSMGQQKPTAYVRPMDGQDQAPDISPTLKPSIEFENSFGNLSFGTLLDGKPSAASSKTKLPKFTILQTSEVSLPSDPSCVEEILRESQHLTPGFTLQKWNDPTTRASTKMLEDDLKLSSDEDDLEPVKTLTTQCTATELYQAVEKAKPRNNPVNPPLATPQPPPAVQASGGSGSSSESESSSESDSDTESSTTDSESNEAPRVATPEPEPPSTNKWQLDKWLNKVTSQNKSFICGQNETPMETISLPPPIIQPMEVQMKVKTNASQVPAEPKERPLLSLIREKARPRPTQKIPETKALKHKLSTTSETVSQRTIGKKQPKKVEKNTSTDEFTWPKPNITSSTPKEKESVELHDPPRGRNKATAHKPAPRKEPRPNIPLAPEKKKYRGPGKIVPKSREFIETDSSTSDSNTDQEETLQIKVLPPCIISGGNTAKSKEICGASLTLSTLMSSSGSNNNLSISNEEPTFSPIPVMQTEILSPLRDHENLKNLWVKIDLDLLSRVPGHSSLHAAPAKPDHKETATKPKRQTAVTAVEKPAPKGKRKHKPIEVAEKIPEKKQRLEEATTICLLPPCISPAPPHKPPNTRENNSSRRANRRKEEKLFPPPLSPLPEDPPRRRNVSGNNGPFGQDKNIAMTGQITSTKPKRTEGKFCATFKGISVNEGDTPKKASSATITVTNTAIATATVTATAIVTTTVTATATATATTTTTTTTISTITSTITTGLMDSSHLEMTSWAALPLLSSSSTNVRRPKLTFDDSVHNADYYMQEAKKLKHKADALFEKFGKAVNYADAALSFTECGNAMERDPLEAKSPYTMYSETVELLRYAMRLKNFASPLASDGDKKLAVLCYRCLSLLYLRMFKLKKDHAMKYSRSLMEYFKQNASKVAQIPSPWVSNGKNTPSPVSLNNVSPINAMGNCNNGPVTIPQRIHHMAASHVNITSNVLRGYEHWDMADKLTRENKEFFGDLDTLMGPLTQHSSMTNLVRYVRQGLCWLRIDAHLL

SEQ ID NO: 8962 - DNA, 1488 bp, Homo sapiens
ccgagaaccgccagcgagctgtgccgagagccgcgccgacccgctgcgatcagggacaggcgcccgcccgccgccgccgcctggccgctatggatctattcgactttttcagagactgggacttggagcagcagtgtcactatgaacaagaccgtagtgcacttaaaaaaagggaatgggagcggaggaatcaagaagtccagcaagaagacgatctcttttcttcaggctttgatctttttggggagccatacaagacaaacaaaggtgatgcacttgccaaccgagtccagaacacgcttggaaactatgatgaaatgaagaatttgctaactaaccattctaatcagaatcacctagtgggaattccaaagaattctgtgccccagaatcccaacaacaaaaatgaaccaagcttttttccagaacaaaagaacagaataattccacctcaccaggataatacccatccttcagcaccaatgcctccaccttctgttgtgatactgaattcaactctaatacacagcaacagaaaatcaaaacctgagtggtcacgtgatagtcataaccctagcactgtactggcaagccaggccagtggtcagccaaacaagatgcagactttgacacaggaccagtctcaagccaaactggaagacttctttgtctacccagctgaacagccccagattggagaagttgaagagtcaaacccatctgcaaaggaagacagtaaccctaattctagtggagaagatgctttcaaagaaatctttcaatccaattcaccggaagaatctgaattcgccgtgcaagcgcctgggtctcccctagtggcttcctctttattagctcctagcagtggcctttcagttcaaaacttcccaccagggctttactgcaaaacaagcatggggcagcaaaagccaactgcatacgtcagacccatggatggccaggaccaggcaccggacatctcaccaacactgaaaccttcaattgaatttgagaacagctttgggaatctgtcatttggaacactcttggatggaaaacccagtgcagccagttcaaagactaaactgccaaagttcaccatcctccaaacaagtgaagtaagccttcccagtgatccaagctgtgttgaagaaatcttgcgggaatcgcagcatctgaccccaggattcaccttacaaaagtggaatgacccaaccaccagagcttctacaaagatgcttgaggatgacctgaagctgagcagtgatgaagatgaccttgagcctgtgaagaccttgaccactcagtgcactgccactgagctctaccaggctgttgaaaaggcaaaacctaggaataatcctgtgaagtaagttattatttttattagttgcaaatgttaattttaacggactcgatgcatgtgaaaaaataaggtcataaaagagaccttggattttgagttaatctctattcatgacaatttaa

SEQ ID NO: 8963 - protein, 427 aa, Homo sapiens
MDLFDFFRDWDLEQQCHYEQDRSALKKREWERRNQEVQQEDDLFSSGFDLFGEPYKTNKGDALANRVQNTLGNYDEMKNLLTNHSNQNHLVGIPKNSVPQNPNNKNEPSFFPEQKNRIIPPHQDNTHPSAPMPPPSVVILNSTLIHSNRKSKPEWSRDSHNPSTVLASQASGQPNKMQTLTQDQSQAKLEDFFVYPAEQPQIGEVEESNPSAKEDSNPNSSGEDAFKEIFQSNSPEESEFAVQAPGSPLVASSLLAPSSGLSVQNFPPGLYCKTSMGQQKPTAYVRPMDGQDQAPDISPTLKPSIEFENSFGNLSFGTLLDGKPSAASSKTKLPKFTILQTSEVSLPSDPSCVEEILRESQHLTPGFTLQKWNDPTTRASTKMLEDDLKLSSDEDDLEPVKTLTTQCTATELYQAVEKAKPRNNPVK

SEQ ID NO: 8964 - DNA, 21 bp, Homo sapiens
tatggctttgsggacagataa

SEQ ID NO: 8965 - DNA, 21 bp, Homo sapiens
tccaaataatraataacttgg

SEQ ID NO: 8966 - DNA, 21 bp, Homo sapiens
ataactttctrttaaaccact

SEQ ID NO: 8967 - DNA, 21 bp, Homo sapiens
gagaatgcatygtatcccaga

SEQ ID NO: 8968 - DNA, 21 bp, Homo sapiens
gtgagatcttktatgtttctt

SEQ ID NO: 8969 - DNA, 21 bp, Homo sapiens
ggctttggacyatactttggg

SEQ ID NO: 8970 - DNA, 21 bp, Homo sapiens
ttattgtgtgractgaggaag

SEQ ID NO: 8971 - DNA, 21 bp, Homo sapiens
aggtattcccrggtaaagaga

SEQ ID NO: 8972 - DNA, 21 bp, Homo sapiens
aacctagatgrccaggaagag

SEQ ID NO: 8973 - DNA, 21 bp, Homo sapiens
tgctatttctkggttatccat

SEQ ID NO: 8974 - DNA, 21 bp, Homo sapiens
tggataatcaygttttaatat

SEQ ID NO: 8975 - DNA, 21 bp, Homo sapiens
cacatggacargaacatcacc

SEQ ID NO: 8976 - DNA, 21 bp, Homo sapiens
agctaattcayctactaagtt

SEQ ID NO: 8977 - DNA, 21 bp, Homo sapiens
gaaaccctaaktgtgtgagaa

SEQ ID NO: 8978 - DNA, 21 bp, Homo sapiens
ttacaaaaacwaaataggaac

SEQ ID NO: 8979 - DNA, 21 bp, Homo sapiens
ctggtcagccycacacctgca

SEQ ID NO: 8980 - DNA, 21 bp, Homo sapiens
accattatgtrggagaagagg

SEQ ID NO: 8981 - DNA, 21 bp, Homo sapiens
ttaacgtggcyaaatccaacc

SEQ ID NO: 8982 - DNA, 21 bp, Homo sapiens
cacccaaacayactgttgaat

SEQ ID NO: 8983 - DNA, 21 bp, Homo sapiens
ccctggccccrattcctttgt

SEQ ID NO: 8984 - DNA, 21 bp, Homo sapiens
atgaataaatyaagtttggtt

SEQ ID NO: 8985 - DNA, 21 bp, Homo sapiens
ccaaagctctyatcattcccc

SEQ ID NO: 8986 - DNA, 21 bp, Homo sapiens
aactactgacmtgaccatctg

SEQ ID NO: 8987 - DNA, 21 bp, Homo sapiens
agaccgaggcwcaaaacactg

SEQ ID NO: 8988 - DNA, 21 bp, Homo sapiens
cgggaatagcyttgggtctgt

SEQ ID NO: 8989 - DNA, 21 bp, Homo sapiens
atactgagacwtctagaacaa

SEQ ID NO: 8990 - DNA, 21 bp, Homo sapiens
ttgcatccccygtggtgttca

SEQ ID NO: 8991 - DNA, 21 bp, Homo sapiens
aagggcttcamaaggtgacat

SEQ ID NO: 8992 - DNA, 21 bp, Homo sapiens
tgctggggagrtgatgggttc

SEQ ID NO: 8993 - DNA, 21 bp, Homo sapiens
caactcagggmcatcatcaca

SEQ ID NO: 8994 - DNA, 21 bp, Homo sapiens
acccagtcccwggcaggttct

SEQ ID NO: 8995 - DNA, 21 bp, Homo sapiens
gaatagtggtrtgcatcagat

SEQ ID NO: 8996 - DNA, 21 bp, Homo sapiens
tccgtttacayagaaaaatgc

SEQ ID NO: 8997 - DNA, 21 bp, Homo sapiens
ttctctgactkcttcaaaggt

SEQ ID NO: 8998 - DNA, 21 bp, Homo sapiens
ccagccttggkaattttaaga

SEQ ID NO: 8999 - DNA, 21 bp, Homo sapiens
acttggacccyagaagtcact

SEQ ID NO: 9000 - DNA, 21 bp, Homo sapiens
ggcatcaacayggcttctgaa

SEQ ID NO: 9001 - DNA, 21 bp, Homo sapiens
tttcaagcacwttcatactaa

SEQ ID NO: 9002 - DNA, 21 bp, Homo sapiens
tgttcctcacrctttcaccaa

SEQ ID NO: 9003 - DNA, 21 bp, Homo sapiens
cacatttcacrgcatatgcgc

SEQ ID NO: 9004 - DNA, 21 bp, Homo sapiens
atccgagacaycagactgaga

SEQ ID NO: 9005 - DNA, 21 bp, Homo sapiens
tattctcacarcacttttcat

SEQ ID NO: 9006 - DNA, 21 bp, Homo sapiens
tgggggtgatsccagtaatgt

SEQ ID NO: 9007 - DNA, 21 bp, Homo sapiens
cagtagaataraacaggtgat

SEQ ID NO: 9008 - DNA, 21 bp, Homo sapiens
agattcacagygtctaaggtt

SEQ ID NO: 9009 - DNA, 21 bp, Homo sapiens
tggcataggamagtcatgagc

SEQ ID NO: 9010 - DNA, 21 bp, Homo sapiens
ttccactcccraaacatgcag

SEQ ID NO: 9011 - DNA, 21 bp, Homo sapiens
acattcctgasacatgtttat

SEQ ID NO: 9012 - DNA, 21 bp, Homo sapiens
aactctactgraaacactaag

SEQ ID NO: 9013 - DNA, 21 bp, Homo sapiens
tatgtacatcyagaaactgag

SEQ ID NO: 9014 - DNA, 21 bp, Homo sapiens
gaaactcgtcwaatccacaga

SEQ ID NO: 9015 - DNA, 21 bp, Homo sapiens
agattggacayggaaagaaag

SEQ ID NO: 9016 - DNA, 21 bp, Homo sapiens
tttgatgtagraaaaaaatat

SEQ ID NO: 9017 - DNA, 21 bp, Homo sapiens
gagaagcatgsgagccttcct

SEQ ID NO: 9018 - DNA, 21 bp, Homo sapiens
aagtggaaagyaagttgctgt

SEQ ID NO: 9019 - DNA, 21 bp, Homo sapiens
taaatgctatsatcaataaca

SEQ ID NO: 9020 - DNA, 21 bp, Homo sapiens
tcgattttctratgttagagg

SEQ ID NO: 9021 - DNA, 21 bp, Homo sapiens
tactctgaacrttctgtgggg

SEQ ID NO: 9022 - DNA, 21 bp, Homo sapiens
taggccatcamatcccatccc

SEQ ID NO: 9023 - DNA, 21 bp, Homo sapiens
aaatgttcacsgatcaatatg

SEQ ID NO: 9024 - DNA, 21 bp, Homo sapiens
tctttattctratctgtacta

SEQ ID NO: 9025 - DNA, 21 bp, Homo sapiens
tggatgactgygttgcaccac

SEQ ID NO: 9026 - DNA, 21 bp, Homo sapiens
cctcacaagtrctggataaag

SEQ ID NO: 9027 - DNA, 21 bp, Homo sapiens
catagtgggcmcttcataatt

SEQ ID NO: 9028 - DNA, 21 bp, Homo sapiens
tttgtggagaktccatgaaga

SEQ ID NO: 9029 - DNA, 21 bp, Homo sapiens
gtacattaatkctaatcctca

SEQ ID NO: 9030 - DNA, 21 bp, Homo sapiens
cctcaaaatayagttgatgaa

SEQ ID NO: 9031 - DNA, 21 bp, Homo sapiens
ttgccagaccragaatcaaag

SEQ ID NO: 9032 - DNA, 21 bp, Homo sapiens
ctgatgaaatrattttagtgt

SEQ ID NO: 9033 - DNA, 21 bp, Homo sapiens
aacaacaaagscactgaattt

SEQ ID NO: 9034 - DNA, 21 bp, Homo sapiens
gttcagttctrtcttccctgg

SEQ ID NO: 9035 - DNA, 21 bp, Homo sapiens
aaacgcattgsaattccaagg

SEQ ID NO: 9036 - DNA, 21 bp, Homo sapiens
tgcagaggcastgcagatttt

SEQ ID NO: 9037 - DNA, 21 bp, Homo sapiens
atcattcgtgygcagagggcc

SEQ ID NO: 9038 - DNA, 21 bp, Homo sapiens
caaaatgtagrcataaggcat

SEQ ID NO: 9039 - DNA, 21 bp, Homo sapiens
tacatgggaakctggcaataa

SEQ ID NO: 9040 - DNA, 21 bp, Homo sapiens
aaacaatcaaycaaagcatca

SEQ ID NO: 9041 - DNA, 21 bp, Homo sapiens
acaacggaacrtgcttacata

SEQ ID NO: 9042 - DNA, 21 bp, Homo sapiens
ttggttctgayatcaagcggt

SEQ ID NO: 9043 - DNA, 21 bp, Homo sapiens
ggggtaactayaaaaacataa

SEQ ID NO: 9044 - DNA, 21 bp, Homo sapiens
aatagtaacarccctcatttt

SEQ ID NO: 9045 - DNA, 21 bp, Homo sapiens
ctgtagttttmtttctctttc

SEQ ID NO: 9046 - DNA, 21 bp, Homo sapiens
ataacagaagrtccacataaa

SEQ ID NO: 9047 - DNA, 21 bp, Homo sapiens
ctcaaatatcyttacatttca

SEQ ID NO: 9048 - DNA, 21 bp, Homo sapiens
attggacagcrgtatactaga

SEQ ID NO: 9049 - DNA, 21 bp, Homo sapiens
actttcataarcctgtattcc

SEQ ID NO: 9050 - DNA, 21 bp, Homo sapiens
acgtgaaaagrtcaccccaca

SEQ ID NO: 9051 - DNA, 21 bp, Homo sapiens
gcttttgccgyttcaacagca

SEQ ID NO: 9052 - DNA, 21 bp, Homo sapiens
caatcgcctaytgaaaaaaaa

SEQ ID NO: 9053 - DNA, 21 bp, Homo sapiens
ttatatgggayagtttagggc

SEQ ID NO: 9054 - DNA, 21 bp, Homo sapiens
ccaatagtggstgagtgtaag

SEQ ID NO: 9055 - DNA, 21 bp, Homo sapiens
cacaatagaaygtctgtctgt

SEQ ID NO: 9056 - DNA, 21 bp, Homo sapiens
aactgttattyatgatatact

SEQ ID NO: 9057 - DNA, 21 bp, Homo sapiens
gggcgggaaargctaaattct

SEQ ID NO: 9058 - DNA, 21 bp, Homo sapiens
tactacatctrccaatccgct

SEQ ID NO: 9059 - DNA, 21 bp, Homo sapiens
cctactatttygagggaaaag

SEQ ID NO: 9060 - DNA, 21 bp, Homo sapiens
ctctaactaargtgagctgca

SEQ ID NO: 9061 - DNA, 21 bp, Homo sapiens
catgtctttargaaatttatg

SEQ ID NO: 9062 - DNA, 21 bp, Homo sapiens
acaactatacmtatcaacata

SEQ ID NO: 9063 - DNA, 21 bp, Homo sapiens
aatacggggcyttttcccata

SEQ ID NO: 9064 - DNA, 21 bp, Homo sapiens
tactaaaaccrcaaaatctct

SEQ ID NO: 9065 - DNA, 21 bp, Homo sapiens
caaggaaataytggctgtact

SEQ ID NO: 9066 - DNA, 21 bp, Homo sapiens
tccactatcamcagtggtaca

SEQ ID NO: 9067 - DNA, 21 bp, Homo sapiens
tacttataaakgcaacatctc

SEQ ID NO: 9068 - DNA, 21 bp, Homo sapiens
gtgattaataygaataaaaca

SEQ ID NO: 9069 - DNA, 21 bp, Homo sapiens
aggtaagagtragttagagtg

SEQ ID NO: 9070 - DNA, 21 bp, Homo sapiens
tctcccctcarggctgaatga

SEQ ID NO: 9071 - DNA, 21 bp, Homo sapiens
ttaagcacacrgaaaaatcca

SEQ ID NO: 9072 - DNA, 21 bp, Homo sapiens
gtcagcacagrtcaaacatgc

SEQ ID NO: 9073 - DNA, 21 bp, Homo sapiens
gcattcacatrcagcacagag

SEQ ID NO: 9074 - DNA, 21 bp, Homo sapiens
atgcattttamtggctaccaa

SEQ ID NO: 9075 - DNA, 21 bp, Homo sapiens
agatgcaagaycatgtgtgtt

SEQ ID NO: 9076 - DNA, 21 bp, Homo sapiens
cttaaagtacktgctgggaag

SEQ ID NO: 9077 - DNA, 21 bp, Homo sapiens
actgtgctccmaaatcctcta

SEQ ID NO: 9078 - DNA, 21 bp, Homo sapiens
gttcataaagrtataaagatc

SEQ ID NO: 9079 - DNA, 21 bp, Homo sapiens
atggttgggcwtctattccaa

SEQ ID NO: 9080 - DNA, 21 bp, Homo sapiens
tttgaaagctygtgtttatag

SEQ ID NO: 9081 - DNA, 21 bp, Homo sapiens
tggcttccttyggtctagttg

SEQ ID NO: 9082 - DNA, 21 bp, Homo sapiens
catctgggagyaaggggtcct

SEQ ID NO: 9083 - DNA, 21 bp, Homo sapiens
atatatggccmaagtcagcat

SEQ ID NO: 9084 - DNA, 21 bp, Homo sapiens
taacataggtrtaatacacag

SEQ ID NO: 9085 - DNA, 21 bp, Homo sapiens
ttggggttagmtctaggcagc

SEQ ID NO: 9086 - DNA, 21 bp, Homo sapiens
actttatgccrccttgtctta

SEQ ID NO: 9087 - DNA, 21 bp, Homo sapiens
ccttgaaatcratatagattt

SEQ ID NO: 9088 - DNA, 21 bp, Homo sapiens
attatctcacragcactcttt

SEQ ID NO: 9089 - DNA, 21 bp, Homo sapiens
gctggaggaayagtcagaggt

SEQ ID NO: 9090 - DNA, 21 bp, Homo sapiens
cattactaggragagtcttgg

SEQ ID NO: 9091 - DNA, 21 bp, Homo sapiens
cttttggacastatgtattca

SEQ ID NO: 9092 - DNA, 21 bp, Homo sapiens
agcaactaatstgccagatga

SEQ ID NO: 9093 - DNA, 21 bp, Homo sapiens
actttttttcyttcctgaaaa

SEQ ID NO: 9094 - DNA, 21 bp, Homo sapiens
agaatacatcmaaaagcattc

SEQ ID NO: 9095 - DNA, 21 bp, Homo sapiens
ctatgctccartgcttaacaa

SEQ ID NO: 9096 - DNA, 21 bp, Homo sapiens
aattccaaaamcttgcaaatt

SEQ ID NO: 9097 - DNA, 21 bp, Homo sapiens
atcctggtaayaagagagtct

SEQ ID NO: 9098 - DNA, 21 bp, Homo sapiens
gtatttttcaraacaattcat

SEQ ID NO: 9099 - DNA, 21 bp, Homo sapiens
gaccaaaataycttttcccct

SEQ ID NO: 9100 - DNA, 21 bp, Homo sapiens
tgttactaaayggaaaaaaat

SEQ ID NO: 9101 - DNA, 21 bp, Homo sapiens
ctggagaaggraacagaggaa

SEQ ID NO: 9102 - DNA, 21 bp, Homo sapiens
cagaatcaagktacactgttg

SEQ ID NO: 9103 - DNA, 21 bp, Homo sapiens
gggatttttawtgttggcact

SEQ ID NO: 9104 - DNA, 21 bp, Homo sapiens
acaaatggggraagaaggatt

SEQ ID NO: 9105 - DNA, 21 bp, Homo sapiens
ccccactagamaacagggtta

SEQ ID NO: 9106 - DNA, 21 bp, Homo sapiens
agcacagctcrggtatttatg

SEQ ID NO: 9107 - DNA, 21 bp, Homo sapiens
acatgaaaagrgaaattgaag

SEQ ID NO: 9108 - DNA, 21 bp, Homo sapiens
aaataaggacyggagactcca

SEQ ID NO: 9109 - DNA, 21 bp, Homo sapiens
ttgcataaatwtcgcctcttc

SEQ ID NO: 9110 - DNA, 21 bp, Homo sapiens
aaaaaaacccytcaacctgaa

SEQ ID NO: 9111 - DNA, 21 bp, Homo sapiens
gaaaagctctrgggagcctga

SEQ ID NO: 9112 - DNA, 21 bp, Homo sapiens
taaatttgaayccatgtacca

SEQ ID NO: 9113 - DNA, 21 bp, Homo sapiens
agctttccacratccccttct

SEQ ID NO: 9114 - DNA, 21 bp, Homo sapiens
aaataggcatrgtaaagagga

SEQ ID NO: 9115 - DNA, 21 bp, Homo sapiens
ttatataagakttctaggtta

SEQ ID NO: 9116 - DNA, 21 bp, Homo sapiens
tctatttttgmccttacatga

SEQ ID NO: 9117 - DNA, 21 bp, Homo sapiens
tagttatgtgrgccaaaaaca

SEQ ID NO: 9118 - DNA, 21 bp, Homo sapiens
acatttcagcytggaaacctg

SEQ ID NO: 9119 - DNA, 21 bp, Homo sapiens
agtagcaatartaagtgatat

SEQ ID NO: 9120 - DNA, 21 bp, Homo sapiens
gggaagaaaasctaactgaat

SEQ ID NO: 9121 - DNA, 21 bp, Homo sapiens
tgtcccaccaygaagatgaag

SEQ ID NO: 9122 - DNA, 21 bp, Homo sapiens
cagggatactkccgaaccact

SEQ ID NO: 9123 - DNA, 21 bp, Homo sapiens
ctataaaaacraaccaaactt

SEQ ID NO: 9124 - DNA, 21 bp, Homo sapiens
tgtgactcgarggatcagatg

SEQ ID NO: 9125 - DNA, 21 bp, Homo sapiens
caaacagcaaraaggtaatta

SEQ ID NO: 9126 - DNA, 21 bp, Homo sapiens
actctcatagrggtccctgat

SEQ ID NO: 9127 - DNA, 21 bp, Homo sapiens
gtctttggcawtagttgctac

SEQ ID NO: 9128 - DNA, 21 bp, Homo sapiens
ctttttacttygcaagccttt

SEQ ID NO: 9129 - DNA, 21 bp, Homo sapiens
aaacccattgwatatcgctta

SEQ ID NO: 9130 - DNA, 21 bp, Homo sapiens
gtaggttaacrtttttataaa

SEQ ID NO: 9131 - DNA, 21 bp, Homo sapiens
tatcaacagcmtattgttaag

SEQ ID NO: 9132 - DNA, 21 bp, Homo sapiens
cagtattagcmaccctgatgc

SEQ ID NO: 9133 - DNA, 21 bp, Homo sapiens
ttgctttatakttacttaatc

SEQ ID NO: 9134 - DNA, 21 bp, Homo sapiens
tcaggtgaaartgtggtcagt

SEQ ID NO: 9135 - DNA, 21 bp, Homo sapiens
ttacttagcakcaggatagct

SEQ ID NO: 9136 - DNA, 21 bp, Homo sapiens
ctgcctcttgytctcatttcc

SEQ ID NO: 9137 - DNA, 21 bp, Homo sapiens
accagataatsctacataggt

SEQ ID NO: 9138 - DNA, 21 bp, Homo sapiens
ccattcccacyttggtttaag

SEQ ID NO: 9139 - DNA, 21 bp, Homo sapiens
aatcacatctrcttttatata

SEQ ID NO: 9140 - DNA, 21 bp, Homo sapiens
cagaaaccagmataaactttg

SEQ ID NO: 9141 - DNA, 21 bp, Homo sapiens
aacagagaagmcccagagcat

SEQ ID NO: 9142 - DNA, 21 bp, Homo sapiens
cattcctcctwttaattctat

SEQ ID NO: 9143 - DNA, 21 bp, Homo sapiens
cactgcgaaasttttcctgag

SEQ ID NO: 9144 - DNA, 21 bp, Homo sapiens
gtatgaaaatrgggaatgagg

SEQ ID NO: 9145 - DNA, 21 bp, Homo sapiens
ggtcattagtytatttctcta

SEQ ID NO: 9146 - DNA, 21 bp, Homo sapiens
tggaaatgcckccaagcctaa

SEQ ID NO: 9147 - DNA, 21 bp, Homo sapiens
gtgttttgaaratactaacgc

SEQ ID NO: 9148 - DNA, 21 bp, Homo sapiens
tttctaagagscttgcaaatg

SEQ ID NO: 9149 - DNA, 21 bp, Homo sapiens
acctgctctgsataaatcttt

SEQ ID NO: 9150 - DNA, 21 bp, Homo sapiens
gatcatcacarcttaaaaggg

SEQ ID NO: 9151 - DNA, 21 bp, Homo sapiens
ctctccagctratcatccaca

SEQ ID NO: 9152 - DNA, 21 bp, Homo sapiens
gatcatcatcrcaaaaatatt

SEQ ID NO: 9153 - DNA, 21 bp, Homo sapiens
ttttcaatgaygatttttggt

SEQ ID NO: 9154 - DNA, 21 bp, Homo sapiens
ttttgataaayggaagttctc

SEQ ID NO: 9155 - DNA, 21 bp, Homo sapiens
gatgaatacartgagttttac

SEQ ID NO: 9156 - DNA, 21 bp, Homo sapiens
tgagctatttraagtctgctc

SEQ ID NO: 9157 - DNA, 21 bp, Homo sapiens
acttttgttcrgatgccattt

SEQ ID NO: 9158 - DNA, 21 bp, Homo sapiens
aaacagatttwtttaccaaat

SEQ ID NO: 9159 - DNA, 21 bp, Homo sapiens
tttcactggtrcaccgtggta

SEQ ID NO: 9160 - DNA, 21 bp, Homo sapiens
gtgatgattaytgttacagtt

SEQ ID NO: 9161 - DNA, 21 bp, Homo sapiens
gtttttcacartagagcagga

SEQ ID NO: 9162 - DNA, 21 bp, Homo sapiens
ttaagcaggamcttcattaga

SEQ ID NO: 9163 - DNA, 21 bp, Homo sapiens
agtcttttacraaaggcaagt

SEQ ID NO: 9164 - DNA, 21 bp, Homo sapiens
cttctcctacmattgccactg

SEQ ID NO: 9165 - DNA, 21 bp, Homo sapiens
taaattatgarcatcttgttg

SEQ ID NO: 9166 - DNA, 21 bp, Homo sapiens
agataaaaagwacatggctgt

SEQ ID NO: 9167 - DNA, 21 bp, Homo sapiens
tcattatgttracctctttct

SEQ ID NO: 9168 - DNA, 21 bp, Homo sapiens
tggccaattaytttctatttc

SEQ ID NO: 9169 - DNA, 21 bp, Homo sapiens
ccttctgatgrgagaaaacct

SEQ ID NO: 9170 - DNA, 21 bp, Homo sapiens
taaaaccattycttaatagtg

SEQ ID NO: 9171 - DNA, 21 bp, Homo sapiens
aaacattaccraaacacatga

SEQ ID NO: 9172 - DNA, 21 bp, Homo sapiens
tcacatctccyaccttcatgg

SEQ ID NO: 9173 - DNA, 21 bp, Homo sapiens
caggtaggggygagcctggat

SEQ ID NO: 9174 - DNA, 21 bp, Homo sapiens
catagactttwagctctttaa

SEQ ID NO: 9175 - DNA, 21 bp, Homo sapiens
gaaaagactarcttatgcttt

SEQ ID NO: 9176 - DNA, 21 bp, Homo sapiens
tcaatgctgawactaggtgga

SEQ ID NO: 9177 - DNA, 21 bp, Homo sapiens
taatttggcawaaatttcagg

SEQ ID NO: 9178 - DNA, 21 bp, Homo sapiens
gaaggcttgtkgttctcctcc

SEQ ID NO: 9179 - DNA, 21 bp, Homo sapiens
taggacttttsacacataaga

SEQ ID NO: 9180 - DNA, 21 bp, Homo sapiens
tacgaggcccrttgacctgga

SEQ ID NO: 9181 - DNA, 21 bp, Homo sapiens
tgaaaagaacycgtttgtaac

SEQ ID NO: 9182 - DNA, 21 bp, Homo sapiens
atggttttatrgaaactgagc

SEQ ID NO: 9183 - DNA, 21 bp, Homo sapiens
aagtcaggtaraagtttctgt

SEQ ID NO: 9184 - DNA, 21 bp, Homo sapiens
tcctctcaatrtctcctctca

SEQ ID NO: 9185 - DNA, 21 bp, Homo sapiens
cagcaagtgarggaaaggaca

SEQ ID NO: 9186 - DNA, 21 bp, Homo sapiens
aattttgcctygggtaaccag

SEQ ID NO: 9187 - DNA, 21 bp, Homo sapiens
ccattgactgsaatgccacct

SEQ ID NO: 9188 - DNA, 21 bp, Homo sapiens
tcattcacaarcatttattta

SEQ ID NO: 9189 - DNA, 21 bp, Homo sapiens
aacaagagatkttcataagaa

SEQ ID NO: 9190 - DNA, 21 bp, Homo sapiens
gtgtaaaatcrtaagattctg

SEQ ID NO: 9191 - DNA, 21 bp, Homo sapiens
ttccaaggccracaagtaatt

SEQ ID NO: 9192 - DNA, 21 bp, Homo sapiens
gaggtacttgkgtcccttatt

SEQ ID NO: 9193 - DNA, 21 bp, Homo sapiens
atacaaactayactttaacat

SEQ ID NO: 9194 - DNA, 21 bp, Homo sapiens
gacacagtcartttccctaac

SEQ ID NO: 9195 - DNA, 21 bp, Homo sapiens
ctttattaacytctccatgca

SEQ ID NO: 9196 - DNA, 21 bp, Homo sapiens
atggactgatygcacctaaca

SEQ ID NO: 9197 - DNA, 21 bp, Homo sapiens
agaacttatgrtatattggac

SEQ ID NO: 9198 - DNA, 21 bp, Homo sapiens
gaccatggagstgagcttacc

SEQ ID NO: 9199 - DNA, 21 bp, Homo sapiens
ccattagcctsagtgatgccc

SEQ ID NO: 9200 - DNA, 21 bp, Homo sapiens
tttctgagaaygtacatttaa

SEQ ID NO: 9201 - DNA, 21 bp, Homo sapiens
agagggaatgmatgtgtctga

SEQ ID NO: 9202 - DNA, 21 bp, Homo sapiens
tggccataaaytcttctctga

SEQ ID NO: 9203 - DNA, 21 bp, Homo sapiens
atcctcacttwtttggggttt

SEQ ID NO: 9204 - DNA, 21 bp, Homo sapiens
tagccacagarggataattcc

SEQ ID NO: 9205 - DNA, 21 bp, Homo sapiens
agattcttccmgtctgggctg

SEQ ID NO: 9206 - DNA, 21 bp, Homo sapiens
ctcctgttatkctatcctgca

SEQ ID NO: 9207 - DNA, 21 bp, Homo sapiens
tagacaccagyctgaagcttt

SEQ ID NO: 9208 - DNA, 21 bp, Homo sapiens
aggttggaatrtcaaatccta

SEQ ID NO: 9209 - DNA, 21 bp, Homo sapiens
agtacagaaayctgtttcaat

SEQ ID NO: 9210 - DNA, 21 bp, Homo sapiens
ttgcaattttwaaaaatgttt

SEQ ID NO: 9211 - DNA, 21 bp, Homo sapiens
taagaaaaatstttcaatgca

SEQ ID NO: 9212 - DNA, 21 bp, Homo sapiens
cagtaactgtrggcctgaaca

SEQ ID NO: 9213 - DNA, 21 bp, Homo sapiens
caagataagaygcatacttct

SEQ ID NO: 9214 - DNA, 21 bp, Homo sapiens
tatgtgattartgtttcatgt

SEQ ID NO: 9215 - DNA, 21 bp, Homo sapiens
agcactatccraacataattt

SEQ ID NO: 9216 - DNA, 21 bp, Homo sapiens
ctggtaattayggaagtacat

SEQ ID NO: 9217 - DNA, 21 bp, Homo sapiens
aatttcacaaygccccgagtc

SEQ ID NO: 9218 - DNA, 21 bp, Homo sapiens
ctatcaataaraaggagcact

SEQ ID NO: 9219 - DNA, 21 bp, Homo sapiens
cccagtcaagwaaaagggcaa

SEQ ID NO: 9220 - DNA, 21 bp, Homo sapiens
gctatatctgrctcacttaac

SEQ ID NO: 9221 - DNA, 21 bp, Homo sapiens
aaccactgggycacacctgcc

SEQ ID NO: 9222 - DNA, 21 bp, Homo sapiens
aaattcaccaycgcaaacacc

SEQ ID NO: 9223 - DNA, 21 bp, Homo sapiens
ttagatcaatrtcatttcaaa

SEQ ID NO: 9224 - DNA, 21 bp, Homo sapiens
tcttcctggcrtcagagctca

SEQ ID NO: 9225 - DNA, 21 bp, Homo sapiens
cggaaaatctytcagagaaga

SEQ ID NO: 9226 - DNA, 21 bp, Homo sapiens
aatggctaatkgagacctccc

SEQ ID NO: 9227 - DNA, 21 bp, Homo sapiens
atgaagaaatrcaacaaaatc

SEQ ID NO: 9228 - DNA, 21 bp, Homo sapiens
gacctagacckccaggttaca

SEQ ID NO: 9229 - DNA, 21 bp, Homo sapiens
tgaattttatrtatttcagta

SEQ ID NO: 9230 - DNA, 21 bp, Homo sapiens
gaacctggcartacaactttg

SEQ ID NO: 9231 - DNA, 21 bp, Homo sapiens
agataaggacrttgagcctct

SEQ ID NO: 9232 - DNA, 21 bp, Homo sapiens
cagagcttttrgcacatttga

SEQ ID NO: 9233 - DNA, 21 bp, Homo sapiens
aaggaaggctygcaacatcct

SEQ ID NO: 9234 - DNA, 21 bp, Homo sapiens
ttgggagccasattttaggat

SEQ ID NO: 9235 - DNA, 21 bp, Homo sapiens
atttgtatttraagatccaaa

SEQ ID NO: 9236 - DNA, 21 bp, Homo sapiens
tttggaaatcytgggaaaacc

SEQ ID NO: 9237 - DNA, 21 bp, Homo sapiens
atattcgactrttttcatatt

SEQ ID NO: 9238 - DNA, 21 bp, Homo sapiens
cctcagtttcyccggctagaa

SEQ ID NO: 9239 - DNA, 21 bp, Homo sapiens
ccagtggtgcrgagaatagac

SEQ ID NO: 9240 - DNA, 21 bp, Homo sapiens
taggatgtgcrtgtgtatttc

SEQ ID NO: 9241 - DNA, 21 bp, Homo sapiens
atgcaacaackctttgccatg

SEQ ID NO: 9242 - DNA, 21 bp, Homo sapiens
attcagttttmattcttgagg

SEQ ID NO: 9243 - DNA, 21 bp, Homo sapiens
ctttctacgayaacccagtat

SEQ ID NO: 9244 - DNA, 21 bp, Homo sapiens
ccccaaaccaycacaccaagt

SEQ ID NO: 9245 - DNA, 21 bp, Homo sapiens
cttctcaaatwtgaatgttcc

SEQ ID NO: 9246 - DNA, 21 bp, Homo sapiens
cacattcttaytttcagtcaa

SEQ ID NO: 9247 - DNA, 21 bp, Homo sapiens
aacatgctggraaacagcaca

SEQ ID NO: 9248 - DNA, 21 bp, Homo sapiens
gctgcttcaargccatcagca

SEQ ID NO: 9249 - DNA, 21 bp, Homo sapiens
gttcaccctcwttctgaaata

SEQ ID NO: 9250 - DNA, 21 bp, Homo sapiens
cagcatgagcrtgggcatgac

SEQ ID NO: 9251 - DNA, 21 bp, Homo sapiens
gatgcagtgtktgtaaagaaa

SEQ ID NO: 9252 - DNA, 21 bp, Homo sapiens
tcagggctgayaatgaattta

SEQ ID NO: 9253 - DNA, 21 bp, Homo sapiens
gaggaaaagcragaagggtgt

SEQ ID NO: 9254 - DNA, 21 bp, Homo sapiens
acagctcctgrgcagagctta

SEQ ID NO: 9255 - DNA, 21 bp, Homo sapiens
atgtgcaatakctgagctcta

SEQ ID NO: 9256 - DNA, 21 bp, Homo sapiens
ctaaaaacacwtctatgttgc

SEQ ID NO: 9257 - DNA, 21 bp, Homo sapiens
aagctttgtgycctggctagt

SEQ ID NO: 9258 - DNA, 21 bp, Homo sapiens
ggaggataaayatctggccat

SEQ ID NO: 9259 - DNA, 21 bp, Homo sapiens
gttaccacgcrgtgaatgtat

SEQ ID NO: 9260 - DNA, 21 bp, Homo sapiens
tgggaatgaarccagaggtgc

SEQ ID NO: 9261 - DNA, 21 bp, Homo sapiens
tgtgataaaaragctggaagg

SEQ ID NO: 9262 - DNA, 21 bp, Homo sapiens
gctcagttagractctgttaa

SEQ ID NO: 9263 - DNA, 21 bp, Homo sapiens
gtgcttaatgraaactgttac

SEQ ID NO: 9264 - DNA, 21 bp, Homo sapiens
aagcacagagscagagtaaat

SEQ ID NO: 9265 - DNA, 21 bp, Homo sapiens
gtcattctacrtatggagctt

SEQ ID NO: 9266 - DNA, 21 bp, Homo sapiens
gaataatttcygccttacgga

SEQ ID NO: 9267 - DNA, 21 bp, Homo sapiens
agtatcccagsaaccctcaag

SEQ ID NO: 9268 - DNA, 21 bp, Homo sapiens
aaatcttgctsattaaaggcc

SEQ ID NO: 9269 - DNA, 21 bp, Homo sapiens
aatatacacamcaaaatgcat

SEQ ID NO: 9270 - DNA, 21 bp, Homo sapiens
gtcaatgcaaytttaatgtaa

SEQ ID NO: 9271 - DNA, 21 bp, Homo sapiens
caagtggttcrccctcacaac

SEQ ID NO: 9272 - DNA, 21 bp, Homo sapiens
gcatcatcgakcttatcattt

SEQ ID NO: 9273 - DNA, 21 bp, Homo sapiens
gccagctgtcrcccactacat

SEQ ID NO: 9274 - DNA, 21 bp, Homo sapiens
taaaaccccarttgatatggt

SEQ ID NO: 9275 - DNA, 21 bp, Homo sapiens
gaccagtgcarctaattaaaa

SEQ ID NO: 9276 - DNA, 21 bp, Homo sapiens
cccctaacagygtcttaagca

SEQ ID NO: 9277 - DNA, 21 bp, Homo sapiens
cgctgattttytttttctgaa

SEQ ID NO: 9278 - DNA, 21 bp, Homo sapiens
ctataaatagyctgcttttaa

SEQ ID NO: 9279 - DNA, 21 bp, Homo sapiens
gaatgatcagmgagcacctga

SEQ ID NO: 9280 - DNA, 21 bp, Homo sapiens
caatatgttaytaatattcac

SEQ ID NO: 9281 - DNA, 21 bp, Homo sapiens
cagtggagaamcttgaaggaa

SEQ ID NO: 9282 - DNA, 21 bp, Homo sapiens
gaatcatctcytctgggcacc

SEQ ID NO: 9283 - DNA, 21 bp, Homo sapiens
aaaatctctgmtggccatttc

SEQ ID NO: 9284 - DNA, 21 bp, Homo sapiens
agcgctgaaayctctcaagtc

SEQ ID NO: 9285 - DNA, 21 bp, Homo sapiens
ccactagtctrgacactgcct

SEQ ID NO: 9286 - DNA, 21 bp, Homo sapiens
gtcatttgctrttctcattgc

SEQ ID NO: 9287 - DNA, 21 bp, Homo sapiens
aaaaatggacsataacatgcc

SEQ ID NO: 9288 - DNA, 21 bp, Homo sapiens
tctcgtaactytcagtattcc

SEQ ID NO: 9289 - DNA, 21 bp, Homo sapiens
ctggtcactcygaatctggaa

SEQ ID NO: 9290 - DNA, 21 bp, Homo sapiens
ctcattcacaraggagaagcc

SEQ ID NO: 9291 - DNA, 21 bp, Homo sapiens
aaaaaattagygttcacaatt

SEQ ID NO: 9292 - DNA, 21 bp, Homo sapiens
agatatatgtwtttgagaatg

SEQ ID NO: 9293 - DNA, 21 bp, Homo sapiens
gtagcataatragcattactt

SEQ ID NO: 9294 - DNA, 21 bp, Homo sapiens
tctgaaagctsactctactga

SEQ ID NO: 9295 - DNA, 21 bp, Homo sapiens
tactatacctsctatatctga

SEQ ID NO: 9296 - DNA, 21 bp, Homo sapiens
tgcacttgtgyctgtgtgtac

SEQ ID NO: 9297 - DNA, 21 bp, Homo sapiens
taaattttacrttaggcttta

SEQ ID NO: 9298 - DNA, 21 bp, Homo sapiens
gaatggttcayttgatgagag

SEQ ID NO: 9299 - DNA, 21 bp, Homo sapiens
tgtgccagtartttctattta

SEQ ID NO: 9300 - DNA, 21 bp, Homo sapiens
gtgacgagcarcactatagat

SEQ ID NO: 9301 - DNA, 21 bp, Homo sapiens
tggaatggagrctgccgagga

SEQ ID NO: 9302 - DNA, 21 bp, Homo sapiens
catcattaatrcaagcactgt

SEQ ID NO: 9303 - DNA, 21 bp, Homo sapiens
tggacctagastgtcatccaa

SEQ ID NO: 9304 - DNA, 21 bp, Homo sapiens
gaagaagaggsaggcattcag

SEQ ID NO: 9305 - DNA, 21 bp, Homo sapiens
cattacttacmtaatggaaaa

SEQ ID NO: 9306 - DNA, 21 bp, Homo sapiens
atctttcaagmaattcttcat

SEQ ID NO: 9307 - DNA, 21 bp, Homo sapiens
gatgttatgcyacacagataa

SEQ ID NO: 9308 - DNA, 21 bp, Homo sapiens
agcttctactrtatgtcaaga

SEQ ID NO: 9309 - DNA, 21 bp, Homo sapiens
atacctgaatraattcatatc

SEQ ID NO: 9310 - DNA, 21 bp, Homo sapiens
tctggccacamcaggttttgt

SEQ ID NO: 9311 - DNA, 21 bp, Homo sapiens
tagggtgatakccacagaaca

SEQ ID NO: 9312 - DNA, 21 bp, Homo sapiens
tgggcatgccraaactgatat

SEQ ID NO: 9313 - DNA, 21 bp, Homo sapiens
accttgggtarctccccactg

SEQ ID NO: 9314 - DNA, 21 bp, Homo sapiens
atgaattatcrtatggtgaac

SEQ ID NO: 9315 - DNA, 21 bp, Homo sapiens
cgtgggctccratctgggaaa

SEQ ID NO: 9316 - DNA, 21 bp, Homo sapiens
tacacaatctrttctctgctt

SEQ ID NO: 9317 - DNA, 21 bp, Homo sapiens
gaggcgaatgragatcatggg

SEQ ID NO: 9318 - DNA, 21 bp, Homo sapiens
aatgcaagctrttgatttttt

SEQ ID NO: 9319 - DNA, 21 bp, Homo sapiens
gatatttgatyaggtagacat

SEQ ID NO: 9320 - DNA, 21 bp, Homo sapiens
tcaacagttayccggattttt

SEQ ID NO: 9321 - DNA, 21 bp, Homo sapiens
gagctacagaygggtctattg

SEQ ID NO: 9322 - DNA, 21 bp, Homo sapiens
tcctgatggaytcatgggact

SEQ ID NO: 9323 - DNA, 21 bp, Homo sapiens
ggggttggaamaccttgattg

SEQ ID NO: 9324 - DNA, 21 bp, Homo sapiens
ggaattctatsctgaaaagcc

SEQ ID NO: 9325 - DNA, 21 bp, Homo sapiens
ttggaaaatgsctttttttac

SEQ ID NO: 9326 - DNA, 21 bp, Homo sapiens
ggaattccgtrtgaagatttg

SEQ ID NO: 9327 - DNA, 21 bp, Homo sapiens
tgcggcccatrccatattgag

SEQ ID NO: 9328 - DNA, 21 bp, Homo sapiens
ctgagggtacrtggagaggat

SEQ ID NO: 9329 - DNA, 21 bp, Homo sapiens
tgcttttgtcrggcccttgtc

SEQ ID NO: 9330 - DNA, 21 bp, Homo sapiens
tatctaagtamaaatgcagca

SEQ ID NO: 9331 - DNA, 21 bp, Homo sapiens
gccccttaagkcaggttttct

SEQ ID NO: 9332 - DNA, 21 bp, Homo sapiens
tagcacataaytggtattgta

SEQ ID NO: 9333 - DNA, 21 bp, Homo sapiens
ttaacaaattrctttcaatgt

SEQ ID NO: 9334 - DNA, 21 bp, Homo sapiens
tcaggattaamgctggacttt

SEQ ID NO: 9335 - DNA, 21 bp, Homo sapiens
ttaaattcccrcagcccatat

SEQ ID NO: 9336 - DNA, 21 bp, Homo sapiens
gaactacaacmagttcatcca

SEQ ID NO: 9337 - DNA, 21 bp, Homo sapiens
tgccaagaaaycctcacctag

SEQ ID NO: 9338 - DNA, 21 bp, Homo sapiens
ctaaagagtargaaatagaga

SEQ ID NO: 9339 - DNA, 21 bp, Homo sapiens
tcgttttctcytccattaaac

SEQ ID NO: 9340 - DNA, 21 bp, Homo sapiens
aaactgtaaayctaagcaaga

SEQ ID NO: 9341 - DNA, 21 bp, Homo sapiens
acttccagaaratatagtcat

SEQ ID NO: 9342 - DNA, 21 bp, Homo sapiens
taattaccatygtcaccgtag

SEQ ID NO: 9343 - DNA, 21 bp, Homo sapiens
taaaacttggycatgttactc

SEQ ID NO: 9344 - DNA, 21 bp, Homo sapiens
cccagatgagrcaccaaaaag

SEQ ID NO: 9345 - DNA, 21 bp, Homo sapiens
tacaattttcygattttgtgg

SEQ ID NO: 9346 - DNA, 21 bp, Homo sapiens
ggtggtgctgstggtaatgat

SEQ ID NO: 9347 - DNA, 21 bp, Homo sapiens
aaagacccagrgttctagcct

SEQ ID NO: 9348 - DNA, 21 bp, Homo sapiens
ttatagattaktctgctatct

SEQ ID NO: 9349 - DNA, 21 bp, Homo sapiens
cttttatttcycacagcacac

SEQ ID NO: 9350 - DNA, 21 bp, Homo sapiens
ttgatgccatrtaagacatat

SEQ ID NO: 9351 - DNA, 21 bp, Homo sapiens
tggaagtgttwgtatttttct

SEQ ID NO: 9352 - DNA, 21 bp, Homo sapiens
aagattgaggmagcatcactg

SEQ ID NO: 9353 - DNA, 21 bp, Homo sapiens
agaatactgtrctcaaataaa

SEQ ID NO: 9354 - DNA, 21 bp, Homo sapiens
tttaaagaacrcaaggaatcc

SEQ ID NO: 9355 - DNA, 21 bp, Homo sapiens
gtttttctgayatataattgt

SEQ ID NO: 9356 - DNA, 21 bp, Homo sapiens
gataatgagastggtgccttt

SEQ ID NO: 9357 - DNA, 21 bp, Homo sapiens
taaaggagacrccaaaggctg

SEQ ID NO: 9358 - DNA, 21 bp, Homo sapiens
aatgtaatgaygtggagccat

SEQ ID NO: 9359 - DNA, 21 bp, Homo sapiens
gcttttctttrgtgccattaa

SEQ ID NO: 9360 - DNA, 21 bp, Homo sapiens
acttacttgaygattttgatg

SEQ ID NO: 9361 - DNA, 21 bp, Homo sapiens
gtttacagcaytgatatagac

SEQ ID NO: 9362 - DNA, 21 bp, Homo sapiens
ttgagaaaaaktttcattctc

SEQ ID NO: 9363 - DNA, 21 bp, Homo sapiens
aaatatatagygctttgtctg

SEQ ID NO: 9364 - DNA, 21 bp, Homo sapiens
gaagtactgaygaatatacaa

SEQ ID NO: 9365 - DNA, 21 bp, Homo sapiens
gctaacttcaraaggaagagg

SEQ ID NO: 9366 - DNA, 21 bp, Homo sapiens
gaccagagctygggcttctca

SEQ ID NO: 9367 - DNA, 21 bp, Homo sapiens
tgaaacgcttracttttaaga

SEQ ID NO: 9368 - DNA, 21 bp, Homo sapiens
agaataatatytgcaatacaa

SEQ ID NO: 9369 - DNA, 21 bp, Homo sapiens
gttcatctgcwcagcatgtca

SEQ ID NO: 9370 - DNA, 21 bp, Homo sapiens
aggccacaggygaaagggtct

SEQ ID NO: 9371 - DNA, 21 bp, Homo sapiens
agaataaagtraaagaaacca

SEQ ID NO: 9372 - DNA, 21 bp, Homo sapiens
ataggagcaaygacagataag

SEQ ID NO: 9373 - DNA, 21 bp, Homo sapiens
aacttttcagmcaatttcatg

SEQ ID NO: 9374 - DNA, 21 bp, Homo sapiens
ctaaatatacrtttgtcttca

SEQ ID NO: 9375 - DNA, 21 bp, Homo sapiens
aaccattccarcagtttctgc

SEQ ID NO: 9376 - DNA, 21 bp, Homo sapiens
ctgagcctacrtgaccaaagt

SEQ ID NO: 9377 - DNA, 21 bp, Homo sapiens
atcagtaaaaracatgggatc

SEQ ID NO: 9378 - DNA, 21 bp, Homo sapiens
gaagagccgtragagcagcag

SEQ ID NO: 9379 - DNA, 21 bp, Homo sapiens
gtgttcatctrctgttccctg

SEQ ID NO: 9380 - DNA, 21 bp, Homo sapiens
aatgctaaaamctccaaccag

SEQ ID NO: 9381 - DNA, 21 bp, Homo sapiens
aattctatcamgtgcaggcac

SEQ ID NO: 9382 - DNA, 21 bp, Homo sapiens
gcttggtaaarctgtcatgcc

SEQ ID NO: 9383 - DNA, 21 bp, Homo sapiens
gaagctttaartcaggtcacc

SEQ ID NO: 9384 - DNA, 21 bp, Homo sapiens
taaccattccrtcctcttggc

SEQ ID NO: 9385 - DNA, 21 bp, Homo sapiens
acaatatgttractatagtca

SEQ ID NO: 9386 - DNA, 21 bp, Homo sapiens
tgtgcaatgtycgtttttgat

SEQ ID NO: 9387 - DNA, 21 bp, Homo sapiens
acaatttttcwttttactaat

SEQ ID NO: 9388 - DNA, 21 bp, Homo sapiens
ccaagaagtaygctaaccaat

SEQ ID NO: 9389 - DNA, 21 bp, Homo sapiens
ctaccttaatmgaatattctg

SEQ ID NO: 9390 - DNA, 21 bp, Homo sapiens
tcatgtgctakatttctgttc

SEQ ID NO: 9391 - DNA, 21 bp, Homo sapiens
atccttaagawattaatcata

SEQ ID NO: 9392 - DNA, 21 bp, Homo sapiens
ggctttaaggytaagcaaatt

SEQ ID NO: 9393 - DNA, 21 bp, Homo sapiens
catagtcaaawtttgtacaga

SEQ ID NO: 9394 - DNA, 21 bp, Homo sapiens
catttcctctycaagttctat

SEQ ID NO: 9395 - DNA, 21 bp, Homo sapiens
cacatatttcraaattaataa

SEQ ID NO: 9396 - DNA, 21 bp, Homo sapiens
cattactttgygcatttatag

SEQ ID NO: 9397 - DNA, 21 bp, Homo sapiens
cagtttaaagrttatcatatt

SEQ ID NO: 9398 - DNA, 21 bp, Homo sapiens
tcaagcctcargattaatctt

SEQ ID NO: 9399 - DNA, 21 bp, Homo sapiens
aactcatgttrgaactgtttc

SEQ ID NO: 9400 - DNA, 21 bp, Homo sapiens
aggtctttgtraaatatgcat

SEQ ID NO: 9401 - DNA, 21 bp, Homo sapiens
ctcttctgagktttttttgta

SEQ ID NO: 9402 - DNA, 21 bp, Homo sapiens
attgacaagaytctatgaagc

SEQ ID NO: 9403 - DNA, 21 bp, Homo sapiens
caatctagatycagttctatt

SEQ ID NO: 9404 - DNA, 21 bp, Homo sapiens
cacgtacagcrtggtatggac

SEQ ID NO: 9405 - DNA, 21 bp, Homo sapiens
atcccaatgtyccagtgtttt

SEQ ID NO: 9406 - DNA, 21 bp, Homo sapiens
gattactggtsagggagcaaa

SEQ ID NO: 9407 - DNA, 21 bp, Homo sapiens
caagataagastgaaaatgtg

SEQ ID NO: 9408 - DNA, 21 bp, Homo sapiens
attttctgcaytagaatagat

SEQ ID NO: 9409 - DNA, 21 bp, Homo sapiens
aggtatgtcayatcatatttc

SEQ ID NO: 9410 - DNA, 21 bp, Homo sapiens
aaagaagactkgatattccac

SEQ ID NO: 9411 - DNA, 21 bp, Homo sapiens
ggaccatgtgytctggttttc

SEQ ID NO: 9412 - DNA, 21 bp, Homo sapiens
tttgtttttgstggagttaca

SEQ ID NO: 9413 - DNA, 21 bp, Homo sapiens
cttcagggackcaatgataac

SEQ ID NO: 9414 - DNA, 21 bp, Homo sapiens
tgaagatggaygagagttccc

SEQ ID NO: 9415 - DNA, 21 bp, Homo sapiens
aggtcacacgyacacatggat

SEQ ID NO: 9416 - DNA, 21 bp, Homo sapiens
tacaacgtggwtatttctcag

SEQ ID NO: 9417 - DNA, 21 bp, Homo sapiens
caagtcttgayacattcatgc

SEQ ID NO: 9418 - DNA, 21 bp, Homo sapiens
gcgttctcccracctactagt

SEQ ID NO: 9419 - DNA, 21 bp, Homo sapiens
agactgtcacrtgtatacttt

SEQ ID NO: 9420 - DNA, 21 bp, Homo sapiens
tgaatcacaayccattagtag

SEQ ID NO: 9421 - DNA, 21 bp, Homo sapiens
taaagtttctmcccataggga

SEQ ID NO: 9422 - DNA, 21 bp, Homo sapiens
tcaacattatkctatcacctt

SEQ ID NO: 9423 - DNA, 21 bp, Homo sapiens
ttattaagtcyaacattatag

SEQ ID NO: 9424 - DNA, 21 bp, Homo sapiens
aaaccacttcyaaaggtatat

SEQ ID NO: 9425 - DNA, 21 bp, Homo sapiens
acctctcgttwgtcattagta

SEQ ID NO: 9426 - DNA, 21 bp, Homo sapiens
acacagtaccwtagtcacata

SEQ ID NO: 9427 - DNA, 21 bp, Homo sapiens
tagttagagcsagtggactgc

SEQ ID NO: 9428 - DNA, 21 bp, Homo sapiens
tagtggggagwcaaaggtagc

SEQ ID NO: 9429 - DNA, 21 bp, Homo sapiens
tgagaccacaygtttagagtg

SEQ ID NO: 9430 - DNA, 21 bp, Homo sapiens
agatcatggcyaggactcggg

SEQ ID NO: 9431 - DNA, 21 bp, Homo sapiens
ctttcactttyaaataaactt

SEQ ID NO: 9432 - DNA, 21 bp, Homo sapiens
tgagttccctsaagacggttt

SEQ ID NO: 9433 - DNA, 21 bp, Homo sapiens
tctgagagagrccttaacagt

SEQ ID NO: 9434 - DNA, 21 bp, Homo sapiens
atttgggtttmacaaagataa

SEQ ID NO: 9435 - DNA, 21 bp, Homo sapiens
cacagaggcargatgtatttt

SEQ ID NO: 9436 - DNA, 21 bp, Homo sapiens
tgcagccacayacgcgaagcc

SEQ ID NO: 9437 - DNA, 21 bp, Homo sapiens
tttgatagacmtaagatgcaa

SEQ ID NO: 9438 - DNA, 21 bp, Homo sapiens
gagagtcctgygctggaaaag

SEQ ID NO: 9439 - DNA, 21 bp, Homo sapiens
ggaaaaagcayatactctaaa

SEQ ID NO: 9440 - DNA, 21 bp, Homo sapiens
taaaatttacrtacatggctg

SEQ ID NO: 9441 - DNA, 21 bp, Homo sapiens
gactggagtcmggcaatcttt

SEQ ID NO: 9442 - DNA, 21 bp, Homo sapiens
tcctgtgataygacctatgag

SEQ ID NO: 9443 - DNA, 21 bp, Homo sapiens
aatggcatctracccaataag

SEQ ID NO: 9444 - DNA, 21 bp, Homo sapiens
gtttggaaaayttaatcaaaa

SEQ ID NO: 9445 - DNA, 21 bp, Homo sapiens
atatctaaacytcaaaatttc

SEQ ID NO: 9446 - DNA, 21 bp, Homo sapiens
tattctatcaktatccagtat

SEQ ID NO: 9447 - DNA, 21 bp, Homo sapiens
ctggatgctcrtgagacccca

SEQ ID NO: 9448 - DNA, 21 bp, Homo sapiens
aagagcaacawatggaccaac

SEQ ID NO: 9449 - DNA, 21 bp, Homo sapiens
tatgtgattaygtatcttctc

SEQ ID NO: 9450 - DNA, 21 bp, Homo sapiens
ataacatcaayacagtggcaa

SEQ ID NO: 9451 - DNA, 21 bp, Homo sapiens
gataataagamaatggaagaa

SEQ ID NO: 9452 - DNA, 21 bp, Homo sapiens
atgacacagtyttgctgacaa

SEQ ID NO: 9453 - DNA, 21 bp, Homo sapiens
acatctatccstggtgccact

SEQ ID NO: 9454 - DNA, 21 bp, Homo sapiens
agcttgtaagractgtttcag

SEQ ID NO: 9455 - DNA, 21 bp, Homo sapiens
aaagccaaccyggtagatatt

SEQ ID NO: 9456 - DNA, 21 bp, Homo sapiens
atcaagaattwtcgtaaccta

SEQ ID NO: 9457 - DNA, 21 bp, Homo sapiens
tgaaagataayatcatgagca

SEQ ID NO: 9458 - DNA, 21 bp, Homo sapiens
gacaagaatarctaaagaatg

SEQ ID NO: 9459 - DNA, 21 bp, Homo sapiens
ggaaatacaaytaaacacaca

SEQ ID NO: 9460 - DNA, 21 bp, Homo sapiens
taagtttccgyccaaactaat

SEQ ID NO: 9461 - DNA, 21 bp, Homo sapiens
tcaaacctttktcacattcca

SEQ ID NO: 9462 - DNA, 21 bp, Homo sapiens
gagataaaaawcttaccaaaa

SEQ ID NO: 9463 - DNA, 21 bp, Homo sapiens
acccaaaaatycatagaaaga

SEQ ID NO: 9464 - DNA, 21 bp, Homo sapiens
aagtttctgtrctaggctctg

SEQ ID NO: 9465 - DNA, 21 bp, Homo sapiens
tagagaatacyatcttccagg

SEQ ID NO: 9466 - DNA, 21 bp, Homo sapiens
caattttgacrttaaagccac

SEQ ID NO: 9467 - DNA, 21 bp, Homo sapiens
catgacaaatratgccttaag

SEQ ID NO: 9468 - DNA, 21 bp, Homo sapiens
aattgtttgtrtacagaatgt

SEQ ID NO: 9469 - DNA, 21 bp, Homo sapiens
cctagctctcraagccccact

SEQ ID NO: 9470 - DNA, 21 bp, Homo sapiens
acaacatacgyacatacaaat

SEQ ID NO: 9471 - DNA, 21 bp, Homo sapiens
ctttaattatygtctatttgt

SEQ ID NO: 9472 - DNA, 21 bp, Homo sapiens
agaaggaatgyctggatttaa

SEQ ID NO: 9473 - DNA, 21 bp, Homo sapiens
agcatggtagsatgggcgttg

SEQ ID NO: 9474 - DNA, 21 bp, Homo sapiens
acaccttgcamctcctctctg

SEQ ID NO: 9475 - DNA, 21 bp, Homo sapiens
taatttgcagwgtctctcctt

SEQ ID NO: 9476 - DNA, 21 bp, Homo sapiens
gctttgaatcyctattttcaa

SEQ ID NO: 9477 - DNA, 21 bp, Homo sapiens
cattactggcyctgcttccct

SEQ ID NO: 9478 - DNA, 21 bp, Homo sapiens
attgacttttraggagaggag

SEQ ID NO: 9479 - DNA, 21 bp, Homo sapiens
aggtacaatgsaacctaacct

SEQ ID NO: 9480 - DNA, 21 bp, Homo sapiens
cagtgcaccastgaacacagc

SEQ ID NO: 9481 - DNA, 21 bp, Homo sapiens
actggccataratgaaacagg

SEQ ID NO: 9482 - DNA, 21 bp, Homo sapiens
gcaactctcartgtagactcc

SEQ ID NO: 9483 - DNA, 21 bp, Homo sapiens
gacaccctagyccatttataa

SEQ ID NO: 9484 - DNA, 21 bp, Homo sapiens
gtaatatatayagaaacctaa

SEQ ID NO: 9485 - DNA, 21 bp, Homo sapiens
gtctagtataraaagcttata

SEQ ID NO: 9486 - DNA, 21 bp, Homo sapiens
aatcagtaatytggagttcct

SEQ ID NO: 9487 - DNA, 21 bp, Homo sapiens
tgtgacgaaaycttatagttg

SEQ ID NO: 9488 - DNA, 21 bp, Homo sapiens
ctcggcttggytcattggtat

SEQ ID NO: 9489 - DNA, 21 bp, Homo sapiens
gaatctcaccraaagcaggtt

SEQ ID NO: 9490 - DNA, 21 bp, Homo sapiens
ttttatactcrtaggtggtct

SEQ ID NO: 9491 - DNA, 21 bp, Homo sapiens
actaatctcamagtgattatc

SEQ ID NO: 9492 - DNA, 21 bp, Homo sapiens
gactatgtttygaaaatcttg

SEQ ID NO: 9493 - DNA, 21 bp, Homo sapiens
gccattgatcyctggactgaa

SEQ ID NO: 9494 - DNA, 21 bp, Homo sapiens
ttcttgaaggyggggaactct

SEQ ID NO: 9495 - DNA, 21 bp, Homo sapiens
ataggattacrtgccaaatat

SEQ ID NO: 9496 - DNA, 21 bp, Homo sapiens
atgcatcttaygaggtggtcc

SEQ ID NO: 9497 - DNA, 21 bp, Homo sapiens
gtcacctttcraaaacaagga

SEQ ID NO: 9498 - DNA, 21 bp, Homo sapiens
ggttgtaaacygaatacctgc

SEQ ID NO: 9499 - DNA, 21 bp, Homo sapiens
attatctcagragagcttatc

SEQ ID NO: 9500 - DNA, 21 bp, Homo sapiens
agtgtatagaytgagaggcag

SEQ ID NO: 9501 - DNA, 21 bp, Homo sapiens
acttttcaaaytgtgcatgat

SEQ ID NO: 9502 - DNA, 21 bp, Homo sapiens
gtagtagagtstggggtattt

SEQ ID NO: 9503 - DNA, 21 bp, Homo sapiens
atttgaaatargtgaaagtca

SEQ ID NO: 9504 - DNA, 21 bp, Homo sapiens
ttaattttacsttatcttcca

SEQ ID NO: 9505 - DNA, 21 bp, Homo sapiens
tgtttgaatgyaagtcatctt

SEQ ID NO: 9506 - DNA, 21 bp, Homo sapiens
gaggaaatatktaactctttt

SEQ ID NO: 9507 - DNA, 21 bp, Homo sapiens
gccaggctgcytcctatacca

SEQ ID NO: 9508 - DNA, 21 bp, Homo sapiens
gaccaagttamacaagtataa

SEQ ID NO: 9509 - DNA, 21 bp, Homo sapiens
ttcagattaasggttgaaaat

SEQ ID NO: 9510 - DNA, 21 bp, Homo sapiens
gtcataacctrtaacagggca

SEQ ID NO: 9511 - DNA, 21 bp, Homo sapiens
tcacaaaaatycttgctagag

SEQ ID NO: 9512 - DNA, 21 bp, Homo sapiens
attctgggttraacaagttaa

SEQ ID NO: 9513 - DNA, 21 bp, Homo sapiens
aaatctaaccygctggattaa

SEQ ID NO: 9514 - DNA, 21 bp, Homo sapiens
tctgagtagtrtctgtccagc

SEQ ID NO: 9515 - DNA, 21 bp, Homo sapiens
gcacagcttcrttttataaaa

SEQ ID NO: 9516 - DNA, 21 bp, Homo sapiens
tgcatttcatmccctggactg

SEQ ID NO: 9517 - DNA, 21 bp, Homo sapiens
ccagaactccrctttccctag

SEQ ID NO: 9518 - DNA, 21 bp, Homo sapiens
gctcattcagytttgttagaa

SEQ ID NO: 9519 - DNA, 21 bp, Homo sapiens
gttttaagtayctgaacgtgt

SEQ ID NO: 9520 - DNA, 21 bp, Homo sapiens
atcttatcacktactactttt

SEQ ID NO: 9521 - DNA, 21 bp, Homo sapiens
gggcttaggamctgtaccttt

SEQ ID NO: 9522 - DNA, 21 bp, Homo sapiens
caatgctggaraatatttcta

SEQ ID NO: 9523 - DNA, 21 bp, Homo sapiens
actcttattcrggttggtaga

SEQ ID NO: 9524 - DNA, 21 bp, Homo sapiens
agtcctgttamtgcaacctcc

SEQ ID NO: 9525 - DNA, 21 bp, Homo sapiens
aacttgcatgytcaccacact

SEQ ID NO: 9526 - DNA, 21 bp, Homo sapiens
ccgcatgtgtrgcaggatgat

SEQ ID NO: 9527 - DNA, 21 bp, Homo sapiens
gaatacaacaraaacactgtg

SEQ ID NO: 9528 - DNA, 21 bp, Homo sapiens
tcaattagaaycttttataaa

SEQ ID NO: 9529 - DNA, 21 bp, Homo sapiens
acgaactccgygatgagacct

SEQ ID NO: 9530 - DNA, 21 bp, Homo sapiens
tccaggccctrtacattatcc

SEQ ID NO: 9531 - DNA, 21 bp, Homo sapiens
taagcaatcayttaaaacaag

SEQ ID NO: 9532 - DNA, 21 bp, Homo sapiens
atgtgtggagyctaccttacc

SEQ ID NO: 9533 - DNA, 21 bp, Homo sapiens
ttgacatcctygagctaaata

SEQ ID NO: 9534 - DNA, 21 bp, Homo sapiens
actggtcctcwtattaatatc

SEQ ID NO: 9535 - DNA, 21 bp, Homo sapiens
gcagatctaakgggacaaagc

SEQ ID NO: 9536 - DNA, 21 bp, Homo sapiens
tgaaggatacytgtaaccttg

SEQ ID NO: 9537 - DNA, 21 bp, Homo sapiens
cgtcagccccrtcgatcagga

SEQ ID NO: 9538 - DNA, 21 bp, Homo sapiens
tttacattttraaaaatcttt

SEQ ID NO: 9539 - DNA, 21 bp, Homo sapiens
agaaactaacraatcagtgct

SEQ ID NO: 9540 - DNA, 21 bp, Homo sapiens
tgaaatatttytttaagtaat

SEQ ID NO: 9541 - DNA, 21 bp, Homo sapiens
aatacgaggcrctaaaattct

SEQ ID NO: 9542 - DNA, 21 bp, Homo sapiens
tatgggggcartcagtggtgc

SEQ ID NO: 9543 - DNA, 21 bp, Homo sapiens
tccaaccaaaytgactcacct

SEQ ID NO: 9544 - DNA, 21 bp, Homo sapiens
actgagattcmtatcttgatg

SEQ ID NO: 9545 - DNA, 21 bp, Homo sapiens
tctctcttgtyatctctcagc

SEQ ID NO: 9546 - DNA, 21 bp, Homo sapiens
ctatccacaarctcagaataa

SEQ ID NO: 9547 - DNA, 21 bp, Homo sapiens
ggggcccaagscagcttgaaa

SEQ ID NO: 9548 - DNA, 21 bp, Homo sapiens
agagttactaytgcaggaaca

SEQ ID NO: 9549 - DNA, 21 bp, Homo sapiens
tagttttcatmataaactcct

SEQ ID NO: 9550 - DNA, 21 bp, Homo sapiens
acacatcctarccttcagctt

SEQ ID NO: 9551 - DNA, 21 bp, Homo sapiens
gtgcacgctcmttcagaatgt

SEQ ID NO: 9552 - DNA, 21 bp, Homo sapiens
aaagcctaccrtgagcctggc

SEQ ID NO: 9553 - DNA, 21 bp, Homo sapiens
ggccatgaagmcacatcaggg

SEQ ID NO: 9554 - DNA, 21 bp, Homo sapiens
tggagccacargaataggtca

SEQ ID NO: 9555 - DNA, 21 bp, Homo sapiens
ctctccttaayagcagaatca

SEQ ID NO: 9556 - DNA, 21 bp, Homo sapiens
gtgtgaataartgcatgctga

SEQ ID NO: 9557 - DNA, 21 bp, Homo sapiens
aacctaggacrcagcagagac

SEQ ID NO: 9558 - DNA, 21 bp, Homo sapiens
tagtgctctcygtgctccagg

SEQ ID NO: 9559 - DNA, 21 bp, Homo sapiens
aaaggaaaaamagtgggcgag

SEQ ID NO: 9560 - DNA, 21 bp, Homo sapiens
atgtttcactygagagattac

SEQ ID NO: 9561 - DNA, 21 bp, Homo sapiens
tccttttctgsaagaatcggg

SEQ ID NO: 9562 - DNA, 21 bp, Homo sapiens
gtcagcattcytgccagcctg

SEQ ID NO: 9563 - DNA, 21 bp, Homo sapiens
ctgactccctkaggttcggcc

SEQ ID NO: 9564 - DNA, 21 bp, Homo sapiens
gcgtgctcccrgtggcccgcc

SEQ ID NO: 9565 - DNA, 21 bp, Homo sapiens
tcatctgtggraaaattatat

SEQ ID NO: 9566 - DNA, 21 bp, Homo sapiens
ttctatatagyaggtatttaa

SEQ ID NO: 9567 - DNA, 21 bp, Homo sapiens
tatactaaagwatatatgtat

SEQ ID NO: 9568 - DNA, 21 bp, Homo sapiens
tggtacgttamaaaggccaga

SEQ ID NO: 9569 - DNA, 21 bp, Homo sapiens
cccgggttctsagacggcaca

SEQ ID NO: 9570 - DNA, 21 bp, Homo sapiens
tgcctgcccartggctcgtgt

SEQ ID NO: 9571 - DNA, 21 bp, Homo sapiens
aataagtaaartttactgtaa

SEQ ID NO: 9572 - DNA, 21 bp, Homo sapiens
ttggccacttsgcaggactga

SEQ ID NO: 9573 - DNA, 21 bp, Homo sapiens
tcaatagcgaygctcccctca

SEQ ID NO: 9574 - DNA, 21 bp, Homo sapiens
tgggttcctarccacagaata

SEQ ID NO: 9575 - DNA, 21 bp, Homo sapiens
gtataccaacrttcagttata

SEQ ID NO: 9576 - DNA, 21 bp, Homo sapiens
caggtcagtaktaataaaagt

SEQ ID NO: 9577 - DNA, 21 bp, Homo sapiens
gaactcaattyaaagtaaatc

SEQ ID NO: 9578 - DNA, 21 bp, Homo sapiens
tgagagaattwaaaaaataaa

SEQ ID NO: 9579 - DNA, 21 bp, Homo sapiens
cttcagccctyagagtatctg

SEQ ID NO: 9580 - DNA, 21 bp, Homo sapiens
atactttgcayatcccctgag

SEQ ID NO: 9581 - DNA, 21 bp, Homo sapiens
gactaggaatsaggttaagtt

SEQ ID NO: 9582 - DNA, 21 bp, Homo sapiens
ctccagagctstagggctgcc

SEQ ID NO: 9583 - DNA, 21 bp, Homo sapiens
atttggaaagrgcatcatctt

SEQ ID NO: 9584 - DNA, 21 bp, Homo sapiens
gggattaacamcatgactgac

SEQ ID NO: 9585 - DNA, 21 bp, Homo sapiens
aacatgcttarttacatgctt

SEQ ID NO: 9586 - DNA, 21 bp, Homo sapiens
atcagtaagaygctattaact

SEQ ID NO: 9587 - DNA, 21 bp, Homo sapiens
acaagagcttsatctgaaatg

SEQ ID NO: 9588 - DNA, 21 bp, Homo sapiens
ggccgcctacracactctgaa

SEQ ID NO: 9589 - DNA, 21 bp, Homo sapiens
gaaaccctcgytacctgggca

SEQ ID NO: 9590 - DNA, 21 bp, Homo sapiens
attaacaacayagaaagcctt

SEQ ID NO: 9591 - DNA, 21 bp, Homo sapiens
ttctccagackgcacagattt

SEQ ID NO: 9592 - DNA, 21 bp, Homo sapiens
tcggagggtayaggaatcact

SEQ ID NO: 9593 - DNA, 21 bp, Homo sapiens
ctcccactccytgggctgcac

SEQ ID NO: 9594 - DNA, 21 bp, Homo sapiens
aagtaagactraggctgggtg

SEQ ID NO: 9595 - DNA, 21 bp, Homo sapiens
gtggcctggasaaatcacctt

SEQ ID NO: 9596 - DNA, 21 bp, Homo sapiens
gctattgcctrtaatttggcc

SEQ ID NO: 9597 - DNA, 21 bp, Homo sapiens
gagaacaattstgaccctgct

SEQ ID NO: 9598 - DNA, 21 bp, Homo sapiens
ttgtgtgataycaactattcg

SEQ ID NO: 9599 - DNA, 21 bp, Homo sapiens
tccttagcttsggttcttata

SEQ ID NO: 9600 - DNA, 21 bp, Homo sapiens
gtggtcttaarggacatagtt

SEQ ID NO: 9601 - DNA, 21 bp, Homo sapiens
acttttctcawccttcctaga

SEQ ID NO: 9602 - DNA, 21 bp, Homo sapiens
gtggtgtcatygccatcgccc

SEQ ID NO: 9603 - DNA, 21 bp, Homo sapiens
ccatggttcayggttatgctt

SEQ ID NO: 9604 - DNA, 21 bp, Homo sapiens
cagaaacacargcatccttgt

SEQ ID NO: 9605 - DNA, 21 bp, Homo sapiens
tcctctgtgcrtatttttttt

SEQ ID NO: 9606 - DNA, 21 bp, Homo sapiens
atcaaacctcwaattgggcag

SEQ ID NO: 9607 - DNA, 21 bp, Homo sapiens
ctaatatgccrttttcatttc

SEQ ID NO: 9608 - DNA, 21 bp, Homo sapiens
tgatggaaccygattcctcca

SEQ ID NO: 9609 - DNA, 21 bp, Homo sapiens
gagaaaaacayggaagttcaa

SEQ ID NO: 9610 - DNA, 21 bp, Homo sapiens
attggacaaarccactgcagc

SEQ ID NO: 9611 - DNA, 21 bp, Homo sapiens
taaaactaatktgctctacag

SEQ ID NO: 9612 - DNA, 21 bp, Homo sapiens
agtcacatttwcattatgctc

SEQ ID NO: 9613 - DNA, 21 bp, Homo sapiens
ttccaggaagmgggtgaagaa

SEQ ID NO: 9614 - DNA, 21 bp, Homo sapiens
ggaattggagrgtagaactaa

SEQ ID NO: 9615 - DNA, 21 bp, Homo sapiens
tcttaggtccrcatatttgaa

SEQ ID NO: 9616 - DNA, 21 bp, Homo sapiens
cattaatggtrcatgagcaca

SEQ ID NO: 9617 - DNA, 21 bp, Homo sapiens
caataaatttrtattctaagt

SEQ ID NO: 9618 - DNA, 21 bp, Homo sapiens
tcaaaagaacwctcttccttc

SEQ ID NO: 9619 - DNA, 21 bp, Homo sapiens
aattggctgargtcagttacc

SEQ ID NO: 9620 - DNA, 21 bp, Homo sapiens
catcatgcaarggactttaag

SEQ ID NO: 9621 - DNA, 21 bp, Homo sapiens
aagaggccctygtctctcaca

SEQ ID NO: 9622 - DNA, 21 bp, Homo sapiens
caggccactgrctttgtgtat

SEQ ID NO: 9623 - DNA, 21 bp, Homo sapiens
cctcgtttttwaaaagcttta

SEQ ID NO: 9624 - DNA, 21 bp, Homo sapiens
gaatatccagmagcaatgcct

SEQ ID NO: 9625 - DNA, 21 bp, Homo sapiens
ttcctcgtttktaaagagttc

SEQ ID NO: 9626 - DNA, 21 bp, Homo sapiens
aaggaaacttyctgcctggcc

SEQ ID NO: 9627 - DNA, 21 bp, Homo sapiens
catgattcacrgatggagtga

SEQ ID NO: 9628 - DNA, 21 bp, Homo sapiens
ggggagatacyctataaaata

SEQ ID NO: 9629 - DNA, 21 bp, Homo sapiens
ttttagggtasgaccatgagg

SEQ ID NO: 9630 - DNA, 21 bp, Homo sapiens
cctgtagagargtgagtgtcc

SEQ ID NO: 9631 - DNA, 21 bp, Homo sapiens
ggacttcttartgattttttt

SEQ ID NO: 9632 - DNA, 21 bp, Homo sapiens
ctggagcaaamtggtacctag

SEQ ID NO: 9633 - DNA, 21 bp, Homo sapiens
tgcatgataaytggatgtttt

SEQ ID NO: 9634 - DNA, 21 bp, Homo sapiens
agcacttccayagggccagcg

SEQ ID NO: 9635 - DNA, 21 bp, Homo sapiens
agaagcctgtsctaagggtct

SEQ ID NO: 9636 - DNA, 21 bp, Homo sapiens
gtcacaaaacrttgtgtctga

SEQ ID NO: 9637 - DNA, 21 bp, Homo sapiens
gactctagatwattacataag

SEQ ID NO: 9638 - DNA, 21 bp, Homo sapiens
tgccatggagyccagacctcc

SEQ ID NO: 9639 - DNA, 21 bp, Homo sapiens
ggccacagatstgtggttctg

SEQ ID NO: 9640 - DNA, 21 bp, Homo sapiens
agaaaggcctrggagaaaaat

SEQ ID NO: 9641 - DNA, 21 bp, Homo sapiens
gcgtaactccragaggcaaac

SEQ ID NO: 9642 - DNA, 21 bp, Homo sapiens
tctcactagcyggattgtttt

SEQ ID NO: 9643 - DNA, 21 bp, Homo sapiens
tgaattcaacktttggaccat

SEQ ID NO: 9644 - DNA, 21 bp, Homo sapiens
ctgagtatttrgagggcagaa

SEQ ID NO: 9645 - DNA, 21 bp, Homo sapiens
agctcaggaakgtcattcaag

SEQ ID NO: 9646 - DNA, 21 bp, Homo sapiens
taaaacccatkttctccctac

SEQ ID NO: 9647 - DNA, 21 bp, Homo sapiens
gatgcttctaytgggccctga

SEQ ID NO: 9648 - DNA, 21 bp, Homo sapiens
ctcccttgagycttgggcagt

SEQ ID NO: 9649 - DNA, 21 bp, Homo sapiens
atagacccagwtagctatatt

SEQ ID NO: 9650 - DNA, 21 bp, Homo sapiens
ctctcgctaargccctagtgc

SEQ ID NO: 9651 - DNA, 21 bp, Homo sapiens
ccatattttcrtccttgcaat

SEQ ID NO: 9652 - DNA, 21 bp, Homo sapiens
caacactcccrcttcaaggaa

SEQ ID NO: 9653 - DNA, 21 bp, Homo sapiens
agtgcgcactrtacaagcaga

SEQ ID NO: 9654 - DNA, 21 bp, Homo sapiens
catgggtcagyctcatttctg

SEQ ID NO: 9655 - DNA, 21 bp, Homo sapiens
agaatccattytctacttctg

SEQ ID NO: 9656 - DNA, 21 bp, Homo sapiens
caggtccactrgaaatggatg

SEQ ID NO: 9657 - DNA, 21 bp, Homo sapiens
attcatttccyagcactgatc

SEQ ID NO: 9658 - DNA, 21 bp, Homo sapiens
tagcaaatggraactgtgcaa

SEQ ID NO: 9659 - DNA, 21 bp, Homo sapiens
cctcaaggtaragatcgcgtg

SEQ ID NO: 9660 - DNA, 21 bp, Homo sapiens
aacattcatcrgaccactgga

SEQ ID NO: 9661 - DNA, 21 bp, Homo sapiens
gtcgccagccwcaggaattag

SEQ ID NO: 9662 - DNA, 21 bp, Homo sapiens
cactggctagyagcatcagtt

SEQ ID NO: 9663 - DNA, 21 bp, Homo sapiens
aaaattttgtyaagggaaatt

SEQ ID NO: 9664 - DNA, 21 bp, Homo sapiens
cgtgggtttgyagggaggatt

SEQ ID NO: 9665 - DNA, 21 bp, Homo sapiens
atgggtgtctyagaggttgga

SEQ ID NO: 9666 - DNA, 21 bp, Homo sapiens
acacatccatwatgtccgagg

SEQ ID NO: 9667 - DNA, 21 bp, Homo sapiens
gtgtatttagsgcatgctgaa

SEQ ID NO: 9668 - DNA, 21 bp, Homo sapiens
tggcagcaacrcagagaaaac

SEQ ID NO: 9669 - DNA, 21 bp, Homo sapiens
taaatcagtarttattgctat

SEQ ID NO: 9670 - DNA, 21 bp, Homo sapiens
ctggtgttgcyggatcttcca

SEQ ID NO: 9671 - DNA, 21 bp, Homo sapiens
agggaatcccrctgatcaggg

SEQ ID NO: 9672 - DNA, 21 bp, Homo sapiens
aggcacatatrttctttcgtg

SEQ ID NO: 9673 - DNA, 21 bp, Homo sapiens
tgctgtggtcwtttgagagga

SEQ ID NO: 9674 - DNA, 21 bp, Homo sapiens
tgctggtttgytgtgggaatg

SEQ ID NO: 9675 - DNA, 21 bp, Homo sapiens
gcttgaaatcrcaaaaggaca

SEQ ID NO: 9676 - DNA, 21 bp, Homo sapiens
ggatcaagacrtggaagagaa

SEQ ID NO: 9677 - DNA, 21 bp, Homo sapiens
cgcagagtatytcggtgcatt

SEQ ID NO: 9678 - DNA, 21 bp, Homo sapiens
ccaagtggtgkattttcataa

SEQ ID NO: 9679 - DNA, 21 bp, Homo sapiens
gggtactagasatcttttctg

SEQ ID NO: 9680 - DNA, 21 bp, Homo sapiens
ggaggctgaartccaagtttg

SEQ ID NO: 9681 - DNA, 21 bp, Homo sapiens
tcttatatttytattcagaca

SEQ ID NO: 9682 - DNA, 21 bp, Homo sapiens
aatagacaaaytagacaaaca

SEQ ID NO: 9683 - DNA, 21 bp, Homo sapiens
ttctgatggayttgagacgca

SEQ ID NO: 9684 - DNA, 21 bp, Homo sapiens
caaagatgctyagttatctgt

SEQ ID NO: 9685 - DNA, 21 bp, Homo sapiens
tcatgtctggraatgctttaa

SEQ ID NO: 9686 - DNA, 21 bp, Homo sapiens
aggctggaaastagaattccc

SEQ ID NO: 9687 - DNA, 21 bp, Homo sapiens
gcaggatcccrtcacagcagg

SEQ ID NO: 9688 - DNA, 21 bp, Homo sapiens
gtaggtcgaaytgcatctgct

SEQ ID NO: 9689 - DNA, 21 bp, Homo sapiens
acaatgaggtrcacagagcgc

SEQ ID NO: 9690 - DNA, 21 bp, Homo sapiens
tctagtcttawgagagcactg

SEQ ID NO: 9691 - DNA, 21 bp, Homo sapiens
cttgacatgayaaagacagtc

SEQ ID NO: 9692 - DNA, 21 bp, Homo sapiens
aggtccagggyacttctagtg

SEQ ID NO: 9693 - DNA, 21 bp, Homo sapiens
tacaggagagyaaaatgaaga

SEQ ID NO: 9694 - DNA, 21 bp, Homo sapiens
tgtgtacaatkgaatagatat

SEQ ID NO: 9695 - DNA, 21 bp, Homo sapiens
gagaacagacrattcttggaa

SEQ ID NO: 9696 - DNA, 21 bp, Homo sapiens
cttattggacsagcccctatg

SEQ ID NO: 9697 - DNA, 21 bp, Homo sapiens
cacggaggctyctttttagat

SEQ ID NO: 9698 - DNA, 21 bp, Homo sapiens
ccaataaaaasaaagtcactc

SEQ ID NO: 9699 - DNA, 21 bp, Homo sapiens
agcgttcaccrgttaaccagg

SEQ ID NO: 9700 - DNA, 21 bp, Homo sapiens
ttattcttgtktggagaactg

SEQ ID NO: 9701 - DNA, 21 bp, Homo sapiens
tcctttatggwtaatgtggat

SEQ ID NO: 9702 - DNA, 21 bp, Homo sapiens
agcctgggackgaggcgtttc

SEQ ID NO: 9703 - DNA, 21 bp, Homo sapiens
ggcgccgagayggatgcttga

SEQ ID NO: 9704 - DNA, 21 bp, Homo sapiens
tatttggtggracaataggaa

SEQ ID NO: 9705 - DNA, 21 bp, Homo sapiens
taaaaaccaastgaaacaaaa

SEQ ID NO: 9706 - DNA, 21 bp, Homo sapiens
cattaaactaratacatatgt

SEQ ID NO: 9707 - DNA, 21 bp, Homo sapiens
caaattcaacycaatgggatg

SEQ ID NO: 9708 - DNA, 21 bp, Homo sapiens
aatcttagcayaatttactct

SEQ ID NO: 9709 - DNA, 21 bp, Homo sapiens
atagctgttaygttgttgtgt

SEQ ID NO: 9710 - DNA, 21 bp, Homo sapiens
ggaacatattstaaagggaga

SEQ ID NO: 9711 - DNA, 21 bp, Homo sapiens
gtaactggaarttcagggata

SEQ ID NO: 9712 - DNA, 21 bp, Homo sapiens
tggtatattartccgcgggta

SEQ ID NO: 9713 - DNA, 21 bp, Homo sapiens
cccagctatcygttgcttcca

SEQ ID NO: 9714 - DNA, 21 bp, Homo sapiens
ttgacacacasagtgctttgt

SEQ ID NO: 9715 - DNA, 21 bp, Homo sapiens
ggagctttctycaaacaagat

SEQ ID NO: 9716 - DNA, 21 bp, Homo sapiens
ctttacatccytaagacaatt

SEQ ID NO: 9717 - DNA, 21 bp, Homo sapiens
atgggatctaytgacactgcc

SEQ ID NO: 9718 - DNA, 21 bp, Homo sapiens
agaatcaagcygctgtctgct

SEQ ID NO: 9719 - DNA, 21 bp, Homo sapiens
ctcaacaacakttggcaaagt

SEQ ID NO: 9720 - DNA, 21 bp, Homo sapiens
tacatatatgyactctatcat

SEQ ID NO: 9721 - DNA, 21 bp, Homo sapiens
ctgtgttggtyccagagtcac

SEQ ID NO: 9722 - DNA, 21 bp, Homo sapiens
ttaagaaaagstttacagacc

SEQ ID NO: 9723 - DNA, 21 bp, Homo sapiens
tgttaagtgayattttaagta

SEQ ID NO: 9724 - DNA, 21 bp, Homo sapiens
gtggtgatttmtatcatgttt

SEQ ID NO: 9725 - DNA, 21 bp, Homo sapiens
ggatgtttagrattggttaaa

SEQ ID NO: 9726 - DNA, 21 bp, Homo sapiens
actcattccartggcttctac

SEQ ID NO: 9727 - DNA, 21 bp, Homo sapiens
ttaggaacacraagggtctag

SEQ ID NO: 9728 - DNA, 21 bp, Homo sapiens
ttttgttttcrtgagatatct

SEQ ID NO: 9729 - DNA, 21 bp, Homo sapiens
ttccatcactktctagaaaca

SEQ ID NO: 9730 - DNA, 21 bp, Homo sapiens
ggacctgactrctacccgaac

SEQ ID NO: 9731 - DNA, 21 bp, Homo sapiens
tttacccagaygatttcagaa

SEQ ID NO: 9732 - DNA, 21 bp, Homo sapiens
tcaaatagagrcagatccatc

SEQ ID NO: 9733 - DNA, 21 bp, Homo sapiens
gctagacttayataacattgc

SEQ ID NO: 9734 - DNA, 21 bp, Homo sapiens
ataatatgaaraaaaaaacta

SEQ ID NO: 9735 - DNA, 21 bp, Homo sapiens
atggagccaarcacaagctgc

SEQ ID NO: 9736 - DNA, 21 bp, Homo sapiens
gagaccctctmtgcttttgag

SEQ ID NO: 9737 - DNA, 21 bp, Homo sapiens
ttcttatcaaragctacccat

SEQ ID NO: 9738 - DNA, 21 bp, Homo sapiens
tgcttaccatyctcaaaaatt

SEQ ID NO: 9739 - DNA, 21 bp, Homo sapiens
ttagttagctytctgaacttt

SEQ ID NO: 9740 - DNA, 21 bp, Homo sapiens
ttagtgaaaarcagcagatta

SEQ ID NO: 9741 - DNA, 21 bp, Homo sapiens
catgagacctkaagtttccaa

SEQ ID NO: 9742 - DNA, 21 bp, Homo sapiens
accatcatgcrgataaatgaa

SEQ ID NO: 9743 - DNA, 21 bp, Homo sapiens
gtggaatagakgctgaaagct

SEQ ID NO: 9744 - DNA, 21 bp, Homo sapiens
gatgagaaacmgctgtgaatg

SEQ ID NO: 9745 - DNA, 21 bp, Homo sapiens
atgctgacatyatttgtttta

SEQ ID NO: 9746 - DNA, 21 bp, Homo sapiens
tatcacagagrtggagccatg

SEQ ID NO: 9747 - DNA, 21 bp, Homo sapiens
gacgtaataaracagatgtca

SEQ ID NO: 9748 - DNA, 21 bp, Homo sapiens
tcacatggcayaaaatttgaa

SEQ ID NO: 9749 - DNA, 21 bp, Homo sapiens
aatgctgagcrataagacttt

SEQ ID NO: 9750 - DNA, 21 bp, Homo sapiens
tctcccctccratcccagcat

SEQ ID NO: 9751 - DNA, 21 bp, Homo sapiens
gcagaggaaastgtatttcat

SEQ ID NO: 9752 - DNA, 21 bp, Homo sapiens
cacatgaatakttgaagggcc

SEQ ID NO: 9753 - DNA, 21 bp, Homo sapiens
gcttgccccgygtaatataat

SEQ ID NO: 9754 - DNA, 21 bp, Homo sapiens
agagatggggmaagttattac

SEQ ID NO: 9755 - DNA, 21 bp, Homo sapiens
actttactctmtaaaatgtgc

SEQ ID NO: 9756 - DNA, 21 bp, Homo sapiens
gtgaaattctrttttttcctt

SEQ ID NO: 9757 - DNA, 21 bp, Homo sapiens
agttcatgggyccttgtaata

SEQ ID NO: 9758 - DNA, 21 bp, Homo sapiens
ggttatattcygagccctgcc

SEQ ID NO: 9759 - DNA, 21 bp, Homo sapiens
aggctagtgtsgcttagcata

SEQ ID NO: 9760 - DNA, 21 bp, Homo sapiens
acgaggaaaamagtgcatgca

SEQ ID NO: 9761 - DNA, 21 bp, Homo sapiens
tgagatattawgctcagaatg

SEQ ID NO: 9762 - DNA, 21 bp, Homo sapiens
tactcacgtcrtatacattcc

SEQ ID NO: 9763 - DNA, 21 bp, Homo sapiens
ttccgaggtckactataattc

SEQ ID NO: 9764 - DNA, 21 bp, Homo sapiens
tgcattaagtwctggctgctt

SEQ ID NO: 9765 - DNA, 21 bp, Homo sapiens
ggcaccacccsttggattttc

SEQ ID NO: 9766 - DNA, 21 bp, Homo sapiens
ctagctcaaaytacaaaagca

SEQ ID NO: 9767 - DNA, 21 bp, Homo sapiens
aaatgtctatkttcaaatcag

SEQ ID NO: 9768 - DNA, 21 bp, Homo sapiens
ggaaatattcygaatccctga

SEQ ID NO: 9769 - DNA, 21 bp, Homo sapiens
aaattcaactyaatcccaggc

SEQ ID NO: 9770 - DNA, 21 bp, Homo sapiens
ggcatctgagycctaaggtcc

SEQ ID NO: 9771 - DNA, 21 bp, Homo sapiens
ggagatctcaraagaaaacac

SEQ ID NO: 9772 - DNA, 21 bp, Homo sapiens
aatctgcccargtctgttcaa

SEQ ID NO: 9773 - DNA, 21 bp, Homo sapiens
ggcccaaaagyaggtaagctg

SEQ ID NO: 9774 - DNA, 21 bp, Homo sapiens
cacgattctgwacaagggcct

SEQ ID NO: 9775 - DNA, 21 bp, Homo sapiens
tttgcctcacyatatctcatt

SEQ ID NO: 9776 - DNA, 21 bp, Homo sapiens
attcacgtgcraaggttaact

SEQ ID NO: 9777 - DNA, 21 bp, Homo sapiens
gagtctgcagsagctaataat

SEQ ID NO: 9778 - DNA, 21 bp, Homo sapiens
ctcctgtgaastgctggtcag

SEQ ID NO: 9779 - DNA, 21 bp, Homo sapiens
acaagagaaargattaccaca

SEQ ID NO: 9780 - DNA, 21 bp, Homo sapiens
tttagtaacgragatccatta

SEQ ID NO: 9781 - DNA, 21 bp, Homo sapiens
aagtggagctrtgctgttata

SEQ ID NO: 9782 - DNA, 21 bp, Homo sapiens
agcccatgaasgggaaaggat

SEQ ID NO: 9783 - DNA, 21 bp, Homo sapiens
ggataagcacrggaatgccat

SEQ ID NO: 9784 - DNA, 21 bp, Homo sapiens
caagaaattamttgatgacac

SEQ ID NO: 9785 - DNA, 21 bp, Homo sapiens
ttccagcctcwtctatcttaa

SEQ ID NO: 9786 - DNA, 21 bp, Homo sapiens
gtcaaaataaycttgatgtta

SEQ ID NO: 9787 - DNA, 21 bp, Homo sapiens
atgtacctctyatcaaaataa

SEQ ID NO: 9788 - DNA, 21 bp, Homo sapiens
caaaccacagrggtgattatt

SEQ ID NO: 9789 - DNA, 21 bp, Homo sapiens
agatgatgaaktgccataaac

SEQ ID NO: 9790 - DNA, 21 bp, Homo sapiens
ctcaactagaygggtaacagg

SEQ ID NO: 9791 - DNA, 21 bp, Homo sapiens
gaggatactgyttgtctactg

SEQ ID NO: 9792 - DNA, 21 bp, Homo sapiens
tatcatgtttsagcctagtac

SEQ ID NO: 9793 - DNA, 21 bp, Homo sapiens
taaagatagcrgattgctact

SEQ ID NO: 9794 - DNA, 21 bp, Homo sapiens
cttcaggccamatcaaaccat

SEQ ID NO: 9795 - DNA, 21 bp, Homo sapiens
gctaatacgcstctgggccaa

SEQ ID NO: 9796 - DNA, 21 bp, Homo sapiens
tatctgaccaygtgattgtat

SEQ ID NO: 9797 - DNA, 21 bp, Homo sapiens
gggactcagaycaagagccag

SEQ ID NO: 9798 - DNA, 21 bp, Homo sapiens
gtgcctcacayaaactaagct

SEQ ID NO: 9799 - DNA, 21 bp, Homo sapiens
agggtgtaaaraacaccagag

SEQ ID NO: 9800 - DNA, 21 bp, Homo sapiens
cttatcttgaygtctgtaatg

SEQ ID NO: 9801 - DNA, 21 bp, Homo sapiens
aaacacagaamatctgaatta

SEQ ID NO: 9802 - DNA, 21 bp, Homo sapiens
cttttttaaasaagctgtgct

SEQ ID NO: 9803 - DNA, 21 bp, Homo sapiens
tacactgtgarctattatagt

SEQ ID NO: 9804 - DNA, 21 bp, Homo sapiens
tcctagctcarggcctctgga

SEQ ID NO: 9805 - DNA, 21 bp, Homo sapiens
agcacagacaygctctcttct

SEQ ID NO: 9806 - DNA, 21 bp, Homo sapiens
gaaaccaatcragaaacaagg

SEQ ID NO: 9807 - DNA, 21 bp, Homo sapiens
actgacgagcktcacagccag

SEQ ID NO: 9808 - DNA, 21 bp, Homo sapiens
atcatgcctcsttgaatctac

SEQ ID NO: 9809 - DNA, 21 bp, Homo sapiens
cagcttatggrttgtagaaag

SEQ ID NO: 9810 - DNA, 21 bp, Homo sapiens
aagaatgaaaytggaaggtaa

SEQ ID NO: 9811 - DNA, 21 bp, Homo sapiens
agcaggggagrgacattgtga

SEQ ID NO: 9812 - DNA, 21 bp, Homo sapiens
gaggggccgtstggcccaaat

SEQ ID NO: 9813 - DNA, 21 bp, Homo sapiens
actatattgcycataagtagt

SEQ ID NO: 9814 - DNA, 21 bp, Homo sapiens
caaggcaaatstgtactcctt

SEQ ID NO: 9815 - DNA, 21 bp, Homo sapiens
tttgttcattkaagagaagtg

SEQ ID NO: 9816 - DNA, 21 bp, Homo sapiens
ggcagaaggastgctgtcatt

SEQ ID NO: 9817 - DNA, 21 bp, Homo sapiens
tatttttaaamtcaagagata

SEQ ID NO: 9818 - DNA, 21 bp, Homo sapiens
tttcattccarttttacaaat

SEQ ID NO: 9819 - DNA, 21 bp, Homo sapiens
tattagttgcrtattttctat

SEQ ID NO: 9820 - DNA, 21 bp, Homo sapiens
atatgaaagtraggaagagct

SEQ ID NO: 9821 - DNA, 21 bp, Homo sapiens
gttttctttcygtctcattac

SEQ ID NO: 9822 - DNA, 21 bp, Homo sapiens
acagctcaacwaattgtgtgt

SEQ ID NO: 9823 - DNA, 21 bp, Homo sapiens
taatctcagtkgctgtaagtt

SEQ ID NO: 9824 - DNA, 21 bp, Homo sapiens
ttgaatttgtsaatatagttc

SEQ ID NO: 9825 - DNA, 21 bp, Homo sapiens
tctcagatacrccgtaatttg

SEQ ID NO: 9826 - DNA, 21 bp, Homo sapiens
tagaatcaagraagcatggtc

SEQ ID NO: 9827 - DNA, 21 bp, Homo sapiens
ttcaggggatygctgcaaaca

SEQ ID NO: 9828 - DNA, 21 bp, Homo sapiens
gcactttttcrgagtcaagag

SEQ ID NO: 9829 - DNA, 21 bp, Homo sapiens
ccaaaagccastgttgcgtgt

SEQ ID NO: 9830 - DNA, 21 bp, Homo sapiens
gtctttgatgytgactccctc

SEQ ID NO: 9831 - DNA, 21 bp, Homo sapiens
aaattagcacwcatgagactt

SEQ ID NO: 9832 - DNA, 21 bp, Homo sapiens
gtgatgatgaygatggtgaca

SEQ ID NO: 9833 - DNA, 21 bp, Homo sapiens
ctatgtatccrtacattgagg

SEQ ID NO: 9834 - DNA, 21 bp, Homo sapiens
cacgggagatrcacaagtgga

SEQ ID NO: 9835 - DNA, 21 bp, Homo sapiens
agtcgttcatyagttgcagtc

SEQ ID NO: 9836 - DNA, 21 bp, Homo sapiens
ccagcaaaacyacagtgtgag

SEQ ID NO: 9837 - DNA, 21 bp, Homo sapiens
aggcaaaacaytaagaaaggc

SEQ ID NO: 9838 - DNA, 21 bp, Homo sapiens
attcttcaggmcccaatctgg

SEQ ID NO: 9839 - DNA, 21 bp, Homo sapiens
agacagacgcyaccatctatc

SEQ ID NO: 9840 - DNA, 21 bp, Homo sapiens
aattaatctgkatcacagcct

SEQ ID NO: 9841 - DNA, 21 bp, Homo sapiens
atatcccacgyagtgctggag

SEQ ID NO: 9842 - DNA, 21 bp, Homo sapiens
tatgtgtaatrtgagctttaa

SEQ ID NO: 9843 - DNA, 21 bp, Homo sapiens
tgttttcaaaygaatgcactc

SEQ ID NO: 9844 - DNA, 21 bp, Homo sapiens
tattgaaggtyccagaatatg

SEQ ID NO: 9845 - DNA, 21 bp, Homo sapiens
tttctcagacrttgctatgtg

SEQ ID NO: 9846 - DNA, 21 bp, Homo sapiens
ccacctgacaygtctggacga

SEQ ID NO: 9847 - DNA, 21 bp, Homo sapiens
taaaagtaacmaagtgctgta

SEQ ID NO: 9848 - DNA, 21 bp, Homo sapiens
tcctgttccaratgtgcactg

SEQ ID NO: 9849 - DNA, 21 bp, Homo sapiens
tgggcttggartcttttctcc

SEQ ID NO: 9850 - DNA, 21 bp, Homo sapiens
atgaattaaayatgggtactt

SEQ ID NO: 9851 - DNA, 21 bp, Homo sapiens
atgaggccacsactgttcaaa

SEQ ID NO: 9852 - DNA, 21 bp, Homo sapiens
cacttacacastgaaaaactt

SEQ ID NO: 9853 - DNA, 21 bp, Homo sapiens
cctggttcatyttaggctctg

SEQ ID NO: 9854 - DNA, 21 bp, Homo sapiens
accatgttatyatttgattgg

SEQ ID NO: 9855 - DNA, 21 bp, Homo sapiens
ggaaggagttyggagtggtag

SEQ ID NO: 9856 - DNA, 21 bp, Homo sapiens
cacagtcttcrgtgaagttta

SEQ ID NO: 9857 - DNA, 21 bp, Homo sapiens
gaattgcctaycacagatacc

SEQ ID NO: 9858 - DNA, 21 bp, Homo sapiens
actctagaacmcatcttgaag

SEQ ID NO: 9859 - DNA, 21 bp, Homo sapiens
gactcaaagtragattatttt

SEQ ID NO: 9860 - DNA, 21 bp, Homo sapiens
ccagagaaagyttcctccact

SEQ ID NO: 9861 - DNA, 21 bp, Homo sapiens
tacccaacacrtgtcagcttt

SEQ ID NO: 9862 - DNA, 21 bp, Homo sapiens
aaggtgccccrtctttgagtg

SEQ ID NO: 9863 - DNA, 21 bp, Homo sapiens
aaaaggtgccwtttggcaata

SEQ ID NO: 9864 - DNA, 21 bp, Homo sapiens
gttgccccacsaatttaagcg

SEQ ID NO: 9865 - DNA, 21 bp, Homo sapiens
tcaattaagcrcatgtatggg

SEQ ID NO: 9866 - DNA, 21 bp, Homo sapiens
ccatagaagaygtagtatttt

SEQ ID NO: 9867 - DNA, 21 bp, Homo sapiens
aaaaaattcaytgttggacta

SEQ ID NO: 9868 - DNA, 21 bp, Homo sapiens
catcttagctkttgtcacaaa

SEQ ID NO: 9869 - DNA, 21 bp, Homo sapiens
agaaattgtgrtatgttacat

SEQ ID NO: 9870 - DNA, 21 bp, Homo sapiens
atgttgccttyggttgggaag

SEQ ID NO: 9871 - DNA, 21 bp, Homo sapiens
gtgaagagaayaagatagatc

SEQ ID NO: 9872 - DNA, 21 bp, Homo sapiens
tcaacgtccaygaggctgtgt

SEQ ID NO: 9873 - DNA, 21 bp, Homo sapiens
gtgggtttgtrctagatgcca

SEQ ID NO: 9874 - DNA, 21 bp, Homo sapiens
gcacttcccaygatgtgttct

SEQ ID NO: 9875 - DNA, 21 bp, Homo sapiens
acaggctggayatcatgactc

SEQ ID NO: 9876 - DNA, 21 bp, Homo sapiens
ggctctagttrtctaaccctt

SEQ ID NO: 9877 - DNA, 21 bp, Homo sapiens
aaaaattttcrcatgtaaaat

SEQ ID NO: 9878 - DNA, 21 bp, Homo sapiens
ctttgggaggyagagttaata

SEQ ID NO: 9879 - DNA, 21 bp, Homo sapiens
gccaagaacgygcacaagcag

SEQ ID NO: 9880 - DNA, 21 bp, Homo sapiens
gaccctggacwgactcctgca

SEQ ID NO: 9881 - DNA, 21 bp, Homo sapiens
gggccttctcrtggtgggggc

SEQ ID NO: 9882 - DNA, 21 bp, Homo sapiens
tatcttgctcytccattcctg

SEQ ID NO: 9883 - DNA, 21 bp, Homo sapiens
atttatattgyttcagataag

SEQ ID NO: 9884 - DNA, 21 bp, Homo sapiens
ggggcaagtarcctgagacgc

SEQ ID NO: 9885 - DNA, 21 bp, Homo sapiens
gacaatggacrtagcattaca

SEQ ID NO: 9886 - DNA, 21 bp, Homo sapiens
caatgcatttrcaatcagatt

SEQ ID NO: 9887 - DNA, 21 bp, Homo sapiens
ggaacaactcrctcctaaagc

SEQ ID NO: 9888 - DNA, 21 bp, Homo sapiens
aaaacatcttrttgctgtagg

SEQ ID NO: 9889 - DNA, 21 bp, Homo sapiens
ctctttccacrtcactaatat

SEQ ID NO: 9890 - DNA, 21 bp, Homo sapiens
ggattcaatgraaacagagct

SEQ ID NO: 9891 - DNA, 21 bp, Homo sapiens
ccgatgtgttkggaaaatgtg

SEQ ID NO: 9892 - DNA, 21 bp, Homo sapiens
agaatcttatrtacacatcca

SEQ ID NO: 9893 - DNA, 21 bp, Homo sapiens
agtgttagtcrtagtacgtag

SEQ ID NO: 9894 - DNA, 21 bp, Homo sapiens
tttgtatctckgacttgttca

SEQ ID NO: 9895 - DNA, 21 bp, Homo sapiens
ggatcatgagyatcatcaact

SEQ ID NO: 9896 - DNA, 21 bp, Homo sapiens
aaatgcgtgcrtgtagatcgt

SEQ ID NO: 9897 - DNA, 21 bp, Homo sapiens
taagttcaatkttgtaagttc

SEQ ID NO: 9898 - DNA, 21 bp, Homo sapiens
agagaggtttygtcaaataag

SEQ ID NO: 9899 - DNA, 21 bp, Homo sapiens
aggaagaattstgttgaaata

SEQ ID NO: 9900 - DNA, 21 bp, Homo sapiens
cagattgacayacatatatcc

SEQ ID NO: 9901 - DNA, 21 bp, Homo sapiens
gttggaccagsgaatctacat

SEQ ID NO: 9902 - DNA, 21 bp, Homo sapiens
atgaatgtgcrccagaggaaa

SEQ ID NO: 9903 - DNA, 21 bp, Homo sapiens
gccaagagacsggtggttgat

SEQ ID NO: 9904 - DNA, 21 bp, Homo sapiens
tttaccaactraggctgtgag

SEQ ID NO: 9905 - DNA, 21 bp, Homo sapiens
tctgcttcttscctgcagctc

SEQ ID NO: 9906 - DNA, 21 bp, Homo sapiens
gaatgattccrtgttgaatgt

SEQ ID NO: 9907 - DNA, 21 bp, Homo sapiens
ctgaaataatrtgtagcttct

SEQ ID NO: 9908 - DNA, 21 bp, Homo sapiens
aaaggcataargagttagagg

SEQ ID NO: 9909 - DNA, 21 bp, Homo sapiens
caccacacttstaaagttagg

SEQ ID NO: 9910 - DNA, 21 bp, Homo sapiens
tggtgatacayttgtaaagaa

SEQ ID NO: 9911 - DNA, 21 bp, Homo sapiens
tattttgagtytatctgagtc

SEQ ID NO: 9912 - DNA, 21 bp, Homo sapiens
gtgtctgtctrtctatctgtc

SEQ ID NO: 9913 - DNA, 21 bp, Homo sapiens
agcaagcaccrcatgtgtttt

SEQ ID NO: 9914 - DNA, 21 bp, Homo sapiens
cctgcaaagartgcctgtcca

SEQ ID NO: 9915 - DNA, 21 bp, Homo sapiens
tggtaaaacaygtagattgca

SEQ ID NO: 9916 - DNA, 21 bp, Homo sapiens
attaagtcatrccaatcccgt

SEQ ID NO: 9917 - DNA, 21 bp, Homo sapiens
gtccattgccyacctaagcca

SEQ ID NO: 9918 - DNA, 21 bp, Homo sapiens
gcattactgawcctgtgtgca

SEQ ID NO: 9919 - DNA, 21 bp, Homo sapiens
ttctccctaayacaactatta

SEQ ID NO: 9920 - DNA, 21 bp, Homo sapiens
aatgcatcatyagggacgaag

SEQ ID NO: 9921 - DNA, 21 bp, Homo sapiens
ctctatgtgcrtcccttcttg

SEQ ID NO: 9922 - DNA, 21 bp, Homo sapiens
aatggtattcrgaaatggcag

SEQ ID NO: 9923 - DNA, 21 bp, Homo sapiens
aagtgtggtcratagacctgc

SEQ ID NO: 9924 - DNA, 21 bp, Homo sapiens
aatttatgtgrcatattttat

SEQ ID NO: 9925 - DNA, 21 bp, Homo sapiens
ataatctatcrcacattcttt

SEQ ID NO: 9926 - DNA, 21 bp, Homo sapiens
tcaataattcrttatatttgg

SEQ ID NO: 9927 - DNA, 21 bp, Homo sapiens
tcttgaatgcyaatggaccta

SEQ ID NO: 9928 - DNA, 21 bp, Homo sapiens
cagcatgtggwagaagctagt

SEQ ID NO: 9929 - DNA, 21 bp, Homo sapiens
caaatttaacrgtggattttg

SEQ ID NO: 9930 - DNA, 21 bp, Homo sapiens
gggtgccaaasagcattttgg

SEQ ID NO: 9931 - DNA, 21 bp, Homo sapiens
tgtagtgtatrgatgtataat

SEQ ID NO: 9932 - DNA, 21 bp, Homo sapiens
agttttaaaakaaattttctt

SEQ ID NO: 9933 - DNA, 21 bp, Homo sapiens
actatggactmgcttctgtgg

SEQ ID NO: 9934 - DNA, 21 bp, Homo sapiens
gttatatggcmcatgactgta

SEQ ID NO: 9935 - DNA, 21 bp, Homo sapiens
gactgagagaygctttcttct

SEQ ID NO: 9936 - DNA, 21 bp, Homo sapiens
aagaggacagkcctgaggatg

SEQ ID NO: 9937 - DNA, 21 bp, Homo sapiens
tcatctgcttrtgatttaaag

SEQ ID NO: 9938 - DNA, 21 bp, Homo sapiens
taatgggaaaygtttttgcta

SEQ ID NO: 9939 - DNA, 21 bp, Homo sapiens
ccaatgtaaaygaccaaatga

SEQ ID NO: 9940 - DNA, 21 bp, Homo sapiens
tttcgtagagwaattgacctg

SEQ ID NO: 9941 - DNA, 21 bp, Homo sapiens
tagactttaayacaatctgaa

SEQ ID NO: 9942 - DNA, 21 bp, Homo sapiens
caatgccttargtttgggaca

SEQ ID NO: 9943 - DNA, 21 bp, Homo sapiens
tcattcccaasatctgactga

SEQ ID NO: 9944 - DNA, 21 bp, Homo sapiens
aattatcaagytcagcacttg

SEQ ID NO: 9945 - DNA, 21 bp, Homo sapiens
tatagagaaartggctctcaa

SEQ ID NO: 9946 - DNA, 21 bp, Homo sapiens
tgaatttaccmatccatctca

SEQ ID NO: 9947 - DNA, 21 bp, Homo sapiens
attgcttttayaattaaaaat

SEQ ID NO: 9948 - DNA, 21 bp, Homo sapiens
aggctagccaygcttggtaat

SEQ ID NO: 9949 - DNA, 21 bp, Homo sapiens
atagaatgaakaaaattgaag

SEQ ID NO: 9950 - DNA, 21 bp, Homo sapiens
ttcaaaggcawaattcaagaa

SEQ ID NO: 9951 - DNA, 21 bp, Homo sapiens
catataaattragagactggt

SEQ ID NO: 9952 - DNA, 21 bp, Homo sapiens
aggaatatttygcatgaaaga

SEQ ID NO: 9953 - DNA, 21 bp, Homo sapiens
cacctaaaaakgacactttct

SEQ ID NO: 9954 - DNA, 21 bp, Homo sapiens
agaaagacttyacttatttga

SEQ ID NO: 9955 - DNA, 21 bp, Homo sapiens
tcataggcttygggcatcaga

SEQ ID NO: 9956 - DNA, 21 bp, Homo sapiens
cagacatctcrttatgcaaaa

SEQ ID NO: 9957 - DNA, 21 bp, Homo sapiens
gagtgtatcaytgataaaagg

SEQ ID NO: 9958 - DNA, 21 bp, Homo sapiens
agactagatamtattttggta

SEQ ID NO: 9959 - DNA, 21 bp, Homo sapiens
aaagagttccstcattttaca

SEQ ID NO: 9960 - DNA, 21 bp, Homo sapiens
gatatttgctrtttcttgttg

SEQ ID NO: 9961 - DNA, 21 bp, Homo sapiens
caatctagccscaacctagct

SEQ ID NO: 9962 - DNA, 21 bp, Homo sapiens
cataaaagttyaagggaggaa

SEQ ID NO: 9963 - DNA, 21 bp, Homo sapiens
cctatgtgatrttaacttggg

SEQ ID NO: 9964 - DNA, 21 bp, Homo sapiens
taagctgttayaaaatttgta

SEQ ID NO: 9965 - DNA, 21 bp, Homo sapiens
tacttaatcaygtattttggc

SEQ ID NO: 9966 - DNA, 21 bp, Homo sapiens
aatgaagtcastgcaggtggt

SEQ ID NO: 9967 - DNA, 21 bp, Homo sapiens
aattctccagygttttgttat

SEQ ID NO: 9968 - DNA, 21 bp, Homo sapiens
tgagaaatctrtacaacacag

SEQ ID NO: 9969 - DNA, 21 bp, Homo sapiens
atatgaattasaaactaatga

SEQ ID NO: 9970 - DNA, 21 bp, Homo sapiens
aaataaaattktcagatacaa

SEQ ID NO: 9971 - DNA, 21 bp, Homo sapiens
taaaaagtagrccagttcctc

SEQ ID NO: 9972 - DNA, 21 bp, Homo sapiens
ccagcaccctsgatcgcttgg

SEQ ID NO: 9973 - DNA, 21 bp, Homo sapiens
acttccttcaracagatgatt

SEQ ID NO: 9974 - DNA, 21 bp, Homo sapiens
ttatctgataytaccctaatt

SEQ ID NO: 9975 - DNA, 21 bp, Homo sapiens
agtgtgattaygtgtttcttg

SEQ ID NO: 9976 - DNA, 21 bp, Homo sapiens
ttagtatgatygtttgaatac

SEQ ID NO: 9977 - DNA, 21 bp, Homo sapiens
ggtattgtacrcatttgttta

SEQ ID NO: 9978 - DNA, 21 bp, Homo sapiens
ggggatccttscagtcattaa

SEQ ID NO: 9979 - DNA, 21 bp, Homo sapiens
gtgaaagtacrtaatacgaca

SEQ ID NO: 9980 - DNA, 21 bp, Homo sapiens
agagagctcartgtttttagt

SEQ ID NO: 9981 - DNA, 21 bp, Homo sapiens
aacttgaaacrcctttcactt

SEQ ID NO: 9982 - DNA, 21 bp, Homo sapiens
gaaaagcaatrtctcctcttc

SEQ ID NO: 9983 - DNA, 21 bp, Homo sapiens
cctgggagagrgtgaactatg

SEQ ID NO: 9984 - DNA, 21 bp, Homo sapiens
caagaggccarttaccttttc

SEQ ID NO: 9985 - DNA, 21 bp, Homo sapiens
ttactacagayactcttcatg

SEQ ID NO: 9986 - DNA, 21 bp, Homo sapiens
gtaaacaatayttgatttagg

SEQ ID NO: 9987 - DNA, 21 bp, Homo sapiens
aaatactgtcrtgagatttag

SEQ ID NO: 9988 - DNA, 21 bp, Homo sapiens
ataggccagcraatactcatg

SEQ ID NO: 9989 - DNA, 21 bp, Homo sapiens
ccacatgtcargagccagaat

SEQ ID NO: 9990 - DNA, 21 bp, Homo sapiens
aggcctcaacwtttttttctt

SEQ ID NO: 9991 - DNA, 21 bp, Homo sapiens
agacgtggcargagagtggaa

SEQ ID NO: 9992 - DNA, 21 bp, Homo sapiens
aaatcttacgktaaaaaaatc

SEQ ID NO: 9993 - DNA, 21 bp, Homo sapiens
gcaaggacaarcaatataggc

SEQ ID NO: 9994 - DNA, 21 bp, Homo sapiens
acataaatccraaaacaaata

SEQ ID NO: 9995 - DNA, 21 bp, Homo sapiens
aagtgaaatargaagaaacag

SEQ ID NO: 9996 - DNA, 21 bp, Homo sapiens
aatattcaaarctgtgaatcg

SEQ ID NO: 9997 - DNA, 21 bp, Homo sapiens
ttattttctcrggaatcttac

SEQ ID NO: 9998 - DNA, 21 bp, Homo sapiens
tttgtggtgcraatgtattaa

SEQ ID NO: 9999 - DNA, 21 bp, Homo sapiens
caaacttttayctactcgccc

SEQ ID NO: 10000 - DNA, 21 bp, Homo sapiens
tgtcttttatwgcctgcacca

SEQ ID NO: 10001 - DNA, 21 bp, Homo sapiens
cagtcgtatcrtaagaatcca

SEQ ID NO: 10002 - DNA, 21 bp, Homo sapiens
ctttacactastctagtcatt

SEQ ID NO: 10003 - DNA, 21 bp, Homo sapiens
taagccagaaracactgaatt

SEQ ID NO: 10004 - DNA, 21 bp, Homo sapiens
aatgcaaactrtttgcacata

SEQ ID NO: 10005 - DNA, 21 bp, Homo sapiens
tggagccacaraaaagtggag

SEQ ID NO: 10006 - DNA, 21 bp, Homo sapiens
agtgtctttamttcctaagag

SEQ ID NO: 10007 - DNA, 21 bp, Homo sapiens
agtcatacccrtaccagtcaa

SEQ ID NO: 10008 - DNA, 21 bp, Homo sapiens
ctcatcttgaytgaatcactg

SEQ ID NO: 10009 - DNA, 21 bp, Homo sapiens
tgtgggagaartctaaacgtc

SEQ ID NO: 10010 - DNA, 21 bp, Homo sapiens
tgaattaatcwaaactatgca

SEQ ID NO: 10011 - DNA, 21 bp, Homo sapiens
gtaacaactgsgaaaccaggg

SEQ ID NO: 10012 - DNA, 21 bp, Homo sapiens
aagatgctcarttgtaccgat

SEQ ID NO: 10013 - DNA, 21 bp, Homo sapiens
ggaccctgtcrttgattagaa

SEQ ID NO: 10014 - DNA, 21 bp, Homo sapiens
tcagacgtgtygacacagata

SEQ ID NO: 10015 - DNA, 21 bp, Homo sapiens
attttctatasaggaaactgt

SEQ ID NO: 10016 - DNA, 21 bp, Homo sapiens
aaccttattayattttagtga

SEQ ID NO: 10017 - DNA, 21 bp, Homo sapiens
gcctgcaaagyttgctgcaaa

SEQ ID NO: 10018 - DNA, 21 bp, Homo sapiens
ctctgcctgasaactaggcac

SEQ ID NO: 10019 - DNA, 21 bp, Homo sapiens
caactgaaaaygaccactctt

SEQ ID NO: 10020 - DNA, 21 bp, Homo sapiens
aagggatgagractacagctt

SEQ ID NO: 10021 - DNA, 21 bp, Homo sapiens
tagaatccaaygtactatcca

SEQ ID NO: 10022 - DNA, 21 bp, Homo sapiens
cttaaccttaygaagaattaa

SEQ ID NO: 10023 - DNA, 21 bp, Homo sapiens
atttccatgamctcctgtgac

SEQ ID NO: 10024 - DNA, 21 bp, Homo sapiens
taaaaagccaycttacacatt

SEQ ID NO: 10025 - DNA, 21 bp, Homo sapiens
caagaggctgsgaaaatttag

SEQ ID NO: 10026 - DNA, 21 bp, Homo sapiens
gtcttactaayaaatacttca

SEQ ID NO: 10027 - DNA, 21 bp, Homo sapiens
cactaaggggyattcaagggt

SEQ ID NO: 10028 - DNA, 21 bp, Homo sapiens
actatgagttyttctctggtt

SEQ ID NO: 10029 - DNA, 21 bp, Homo sapiens
ggccagggaarctaatgactg

SEQ ID NO: 10030 - DNA, 21 bp, Homo sapiens
actgtgggtaytggctctttc

SEQ ID NO: 10031 - DNA, 21 bp, Homo sapiens
tgctttccacragccattcct

SEQ ID NO: 10032 - DNA, 21 bp, Homo sapiens
aaaagcttctyatgtctggtc

SEQ ID NO: 10033 - DNA, 21 bp, Homo sapiens
ctttacaaacrtaaaagttct

SEQ ID NO: 10034 - DNA, 21 bp, Homo sapiens
acaagtgttgsgcaagagaga

SEQ ID NO: 10035 - DNA, 21 bp, Homo sapiens
aagaccaacakatattgggtg

SEQ ID NO: 10036 - DNA, 21 bp, Homo sapiens
tacttgaattrtcttatttgc

SEQ ID NO: 10037 - DNA, 21 bp, Homo sapiens
aaatgttaggrgacataatta

SEQ ID NO: 10038 - DNA, 21 bp, Homo sapiens
aagacctgtcktacgagatat

SEQ ID NO: 10039 - DNA, 21 bp, Homo sapiens
aagtgatactyctccaaatca

SEQ ID NO: 10040 - DNA, 21 bp, Homo sapiens
taacatttctkaagtagtttt

SEQ ID NO: 10041 - DNA, 21 bp, Homo sapiens
aagacagaaayaccattagag

SEQ ID NO: 10042 - DNA, 21 bp, Homo sapiens
ccaataaacaytcaaagtttg

SEQ ID NO: 10043 - DNA, 21 bp, Homo sapiens
atgctatttcratttctttca

SEQ ID NO: 10044 - DNA, 21 bp, Homo sapiens
tttagaaagaygttccagagt

SEQ ID NO: 10045 - DNA, 21 bp, Homo sapiens
gctcctttgcrctaatgctta

SEQ ID NO: 10046 - DNA, 21 bp, Homo sapiens
gtgactccttkaaattgtcct

SEQ ID NO: 10047 - DNA, 21 bp, Homo sapiens
cagacaagggrgaattcagaa

SEQ ID NO: 10048 - DNA, 21 bp, Homo sapiens
ttagcctacamgaatctttga

SEQ ID NO: 10049 - DNA, 21 bp, Homo sapiens
agggaatctarctttctgatt

SEQ ID NO: 10050 - DNA, 21 bp, Homo sapiens
tttttagaacyagcagttctt

SEQ ID NO: 10051 - DNA, 21 bp, Homo sapiens
ggtaaattgcwtacatgttaa

SEQ ID NO: 10052 - DNA, 21 bp, Homo sapiens
aaatttttttktgtggatcta

SEQ ID NO: 10053 - DNA, 21 bp, Homo sapiens
agtgttatttstttagatgcc

SEQ ID NO: 10054 - DNA, 21 bp, Homo sapiens
tttttttcagyttaatgttgt

SEQ ID NO: 10055 - DNA, 21 bp, Homo sapiens
caaagagtaakggaagtcaca

SEQ ID NO: 10056 - DNA, 21 bp, Homo sapiens
agcaccatttracaagcattg

SEQ ID NO: 10057 - DNA, 21 bp, Homo sapiens
attttccaacrtcaggttaac

SEQ ID NO: 10058 - DNA, 21 bp, Homo sapiens
tgtttcacctractaggaact

SEQ ID NO: 10059 - DNA, 21 bp, Homo sapiens
tttgaaggatyatgcctcttt

SEQ ID NO: 10060 - DNA, 21 bp, Homo sapiens
caaaaaaaatscaaataggaa

SEQ ID NO: 10061 - DNA, 21 bp, Homo sapiens
aattccattayaaaaattagt

SEQ ID NO: 10062 - DNA, 21 bp, Homo sapiens
acctatctcaytgagtaatct

SEQ ID NO: 10063 - DNA, 21 bp, Homo sapiens
ttgaaaaaaawatattgcctg

SEQ ID NO: 10064 - DNA, 21 bp, Homo sapiens
tatgaattttwaaaaatcaat

SEQ ID NO: 10065 - DNA, 21 bp, Homo sapiens
atttaatcackggacatttgc

SEQ ID NO: 10066 - DNA, 21 bp, Homo sapiens
tatcttataaragtaacaata

SEQ ID NO: 10067 - DNA, 21 bp, Homo sapiens
attattttgaygtgtgagtca

SEQ ID NO: 10068 - DNA, 21 bp, Homo sapiens
atagctttatrcatcaagttc

SEQ ID NO: 10069 - DNA, 21 bp, Homo sapiens
acataatattmgttattaaga

SEQ ID NO: 10070 - DNA, 21 bp, Homo sapiens
accttagactrtgaataaagt

SEQ ID NO: 10071 - DNA, 21 bp, Homo sapiens
ctatattctaytcatcatata

SEQ ID NO: 10072 - DNA, 21 bp, Homo sapiens
atagcaggackaagataacca

SEQ ID NO: 10073 - DNA, 21 bp, Homo sapiens
ttttcttttgracaggaattt

SEQ ID NO: 10074 - DNA, 21 bp, Homo sapiens
gaagtcacacrctttcagcct

SEQ ID NO: 10075 - DNA, 21 bp, Homo sapiens
gacatactacrattttttttt

SEQ ID NO: 10076 - DNA, 21 bp, Homo sapiens
gttgtctccartgtgcttgga

SEQ ID NO: 10077 - DNA, 21 bp, Homo sapiens
atctttaaatytgacttgttt

SEQ ID NO: 10078 - DNA, 21 bp, Homo sapiens
aaaatactcartgagacatgg

SEQ ID NO: 10079 - DNA, 21 bp, Homo sapiens
ttccatgtgcycttgttggtg

SEQ ID NO: 10080 - DNA, 21 bp, Homo sapiens
tcaatagagayacacatgtgc

SEQ ID NO: 10081 - DNA, 21 bp, Homo sapiens
ctctgcactgmtccattagca

SEQ ID NO: 10082 - DNA, 21 bp, Homo sapiens
actatgacagwtataacaata

SEQ ID NO: 10083 - DNA, 21 bp, Homo sapiens
aagaatgatamaacgagcaag

SEQ ID NO: 10084 - DNA, 21 bp, Homo sapiens
catcaaaaagragtcttggta

SEQ ID NO: 10085 - DNA, 21 bp, Homo sapiens
atatcagataytaaaaatatg

SEQ ID NO: 10086 - DNA, 21 bp, Homo sapiens
ctagaacttcytaatgactga

SEQ ID NO: 10087 - DNA, 21 bp, Homo sapiens
atgtacatctrctacttacat

SEQ ID NO: 10088 - DNA, 21 bp, Homo sapiens
cttcagattgwagctcctaat

SEQ ID NO: 10089 - DNA, 21 bp, Homo sapiens
acaaagagtgytaatgaagtg

SEQ ID NO: 10090 - DNA, 21 bp, Homo sapiens
ttgtggggtamattatctttt

SEQ ID NO: 10091 - DNA, 21 bp, Homo sapiens
tttactaagcyggctgtctac

SEQ ID NO: 10092 - DNA, 21 bp, Homo sapiens
tatcatctacstacgcttcat

SEQ ID NO: 10093 - DNA, 21 bp, Homo sapiens
tttgctaggcwgtaaggaata

SEQ ID NO: 10094 - DNA, 21 bp, Homo sapiens
tgaagacaagractaggccga

SEQ ID NO: 10095 - DNA, 21 bp, Homo sapiens
tagaagtcgarataagttaga

SEQ ID NO: 10096 - DNA, 21 bp, Homo sapiens
cttgaagtcaycccgtgtata

SEQ ID NO: 10097 - DNA, 21 bp, Homo sapiens
ttttctggatrttaaactaca

SEQ ID NO: 10098 - DNA, 21 bp, Homo sapiens
aaccctgaggraaatttaata

SEQ ID NO: 10099 - DNA, 21 bp, Homo sapiens
ccttaggtttktatattctgt

SEQ ID NO: 10100 - DNA, 21 bp, Homo sapiens
tcctccattcrtctccatttc

SEQ ID NO: 10101 - DNA, 21 bp, Homo sapiens
caaaaatctakgtatcttcct

SEQ ID NO: 10102 - DNA, 21 bp, Homo sapiens
cttttgtcccragttccagtt

SEQ ID NO: 10103 - DNA, 21 bp, Homo sapiens
attacataagmcaactcacag

SEQ ID NO: 10104 - DNA, 21 bp, Homo sapiens
cagtatttaarttactgagct

SEQ ID NO: 10105 - DNA, 21 bp, Homo sapiens
aaactagacawctataccaat

SEQ ID NO: 10106 - DNA, 21 bp, Homo sapiens
tcctgagtagwcaccaatgcc

SEQ ID NO: 10107 - DNA, 21 bp, Homo sapiens
ttggcaaatartattcgatta

SEQ ID NO: 10108 - DNA, 21 bp, Homo sapiens
tttgcagttayaatggagctg

SEQ ID NO: 10109 - DNA, 21 bp, Homo sapiens
cttatgttggrgaagttgatt

SEQ ID NO: 10110 - DNA, 21 bp, Homo sapiens
aaagtcatctragtcagaaat

SEQ ID NO: 10111 - DNA, 21 bp, Homo sapiens
ctggactcttktattggttcg

SEQ ID NO: 10112 - DNA, 21 bp, Homo sapiens
ttttgttgttkatgttatctt

SEQ ID NO: 10113 - DNA, 21 bp, Homo sapiens
ctcaaagttaragaccatgaa

SEQ ID NO: 10114 - DNA, 21 bp, Homo sapiens
ggcttttctgrtgattcttac

SEQ ID NO: 10115 - DNA, 21 bp, Homo sapiens
ttctccttggygggtggaatt

SEQ ID NO: 10116 - DNA, 21 bp, Homo sapiens
ctttataatcragggctaaat

SEQ ID NO: 10117 - DNA, 21 bp, Homo sapiens
tagggatgaamtaatcactgt

SEQ ID NO: 10118 - DNA, 21 bp, Homo sapiens
gaggggcagcyaagatttatg

SEQ ID NO: 10119 - DNA, 21 bp, Homo sapiens
ctcataactgygtacgaagca

SEQ ID NO: 10120 - DNA, 21 bp, Homo sapiens
taggaaggacrataggtgaga

SEQ ID NO: 10121 - DNA, 21 bp, Homo sapiens
tgcctatctartattttgtgc

SEQ ID NO: 10122 - DNA, 21 bp, Homo sapiens
tacatttattygacagctact

SEQ ID NO: 10123 - DNA, 21 bp, Homo sapiens
atctttttctrtacgattctt

SEQ ID NO: 10124 - DNA, 21 bp, Homo sapiens
aagcttcttarcaatgtatat

SEQ ID NO: 10125 - DNA, 21 bp, Homo sapiens
tagtcctgggwaattgggacc

SEQ ID NO: 10126 - DNA, 21 bp, Homo sapiens
ttcatggacasctcaccttct

SEQ ID NO: 10127 - DNA, 21 bp, Homo sapiens
gaaaatggccmagataaaaat

SEQ ID NO: 10128 - DNA, 21 bp, Homo sapiens
attgaggcacwactgaaaaag

SEQ ID NO: 10129 - DNA, 21 bp, Homo sapiens
taaaagttatrttgactggct

SEQ ID NO: 10130 - DNA, 21 bp, Homo sapiens
acactaacttytttgctctca

SEQ ID NO: 10131 - DNA, 21 bp, Homo sapiens
gtggccatgcmtgaggttgag

SEQ ID NO: 10132 - DNA, 21 bp, Homo sapiens
gtttgtatggyctattgcata

SEQ ID NO: 10133 - DNA, 21 bp, Homo sapiens
ccatttatagygttccatgtg

SEQ ID NO: 10134 - DNA, 21 bp, Homo sapiens
ttcactctgaytaatggatgg

SEQ ID NO: 10135 - DNA, 21 bp, Homo sapiens
caaggtttcayttgaggtgcc

SEQ ID NO: 10136 - DNA, 21 bp, Homo sapiens
atgactggtayactttacaca

SEQ ID NO: 10137 - DNA, 21 bp, Homo sapiens
aacaggagaayggaatccctg

SEQ ID NO: 10138 - DNA, 21 bp, Homo sapiens
ctgcttttctrtggtcacatc

SEQ ID NO: 10139 - DNA, 21 bp, Homo sapiens
taagcaaattyggagatacag

SEQ ID NO: 10140 - DNA, 21 bp, Homo sapiens
aagccaaggaytggatcattt

SEQ ID NO: 10141 - DNA, 21 bp, Homo sapiens
gatatggttcrgctgtggcga

SEQ ID NO: 10142 - DNA, 21 bp, Homo sapiens
aggaaatctcrtaattgagaa

SEQ ID NO: 10143 - DNA, 21 bp, Homo sapiens
tgaacttaatyctttatccaa

SEQ ID NO: 10144 - DNA, 21 bp, Homo sapiens
cctccaaatcsttcctgagag

SEQ ID NO: 10145 - DNA, 21 bp, Homo sapiens
cttaatgttayggtgattttt

SEQ ID NO: 10146 - DNA, 21 bp, Homo sapiens
tactactttcscttaacaagg

SEQ ID NO: 10147 - DNA, 21 bp, Homo sapiens
ctgacaaatcraagcagaaaa

SEQ ID NO: 10148 - DNA, 21 bp, Homo sapiens
tcatatgcttrttgtgacttg

SEQ ID NO: 10149 - DNA, 21 bp, Homo sapiens
gctttttccaratagaggtgt

SEQ ID NO: 10150 - DNA, 21 bp, Homo sapiens
tctgtattatwcttaatggtg

SEQ ID NO: 10151 - DNA, 21 bp, Homo sapiens
ctaggaatctkgcaaagtgga

SEQ ID NO: 10152 - DNA, 21 bp, Homo sapiens
tgaaagagacrgagtctaaga

SEQ ID NO: 10153 - DNA, 21 bp, Homo sapiens
atatgtattcyggctagactg

SEQ ID NO: 10154 - DNA, 21 bp, Homo sapiens
tgtaagtacaytggcttttat

SEQ ID NO: 10155 - DNA, 21 bp, Homo sapiens
ctttataggtrcatacttatg

SEQ ID NO: 10156 - DNA, 21 bp, Homo sapiens
actgattttcwaagtatatcc

SEQ ID NO: 10157 - DNA, 21 bp, Homo sapiens
acacaacttarccatgtatgg

SEQ ID NO: 10158 - DNA, 21 bp, Homo sapiens
cactttgcctrtgatgaggct

SEQ ID NO: 10159 - DNA, 21 bp, Homo sapiens
caagcttttcmtgcttgtcag

SEQ ID NO: 10160 - DNA, 21 bp, Homo sapiens
agttttgaatrttcttgtggt

SEQ ID NO: 10161 - DNA, 21 bp, Homo sapiens
ggaaagtgaaygtagtttcat

SEQ ID NO: 10162 - DNA, 21 bp, Homo sapiens
cccataaatayctctagaatc

SEQ ID NO: 10163 - DNA, 21 bp, Homo sapiens
ctaaggttttmgttttttgga

SEQ ID NO: 10164 - DNA, 21 bp, Homo sapiens
acattacttayttgcctgatg

SEQ ID NO: 10165 - DNA, 21 bp, Homo sapiens
ggtccgggtgktcttggaaat

SEQ ID NO: 10166 - DNA, 21 bp, Homo sapiens
acatttttgtwtggtacaagt

SEQ ID NO: 10167 - DNA, 21 bp, Homo sapiens
ttcaaggcatyttaataaact

SEQ ID NO: 10168 - DNA, 21 bp, Homo sapiens
aggtattatckatggacattt

SEQ ID NO: 10169 - DNA, 21 bp, Homo sapiens
tcttttagcaygttaggacca

SEQ ID NO: 10170 - DNA, 21 bp, Homo sapiens
ggccttctctkctctgtttgc

SEQ ID NO: 10171 - DNA, 21 bp, Homo sapiens
ttgagaaagcygaaaagaaag

SEQ ID NO: 10172 - DNA, 21 bp, Homo sapiens
ataattatgtrgagaggaata

SEQ ID NO: 10173 - DNA, 21 bp, Homo sapiens
gtactaccaaygtcttgagtt

SEQ ID NO: 10174 - DNA, 21 bp, Homo sapiens
gtgtccaatcrtcttctcatt

SEQ ID NO: 10175 - DNA, 21 bp, Homo sapiens
cataattaatytgtaaaagtt

SEQ ID NO: 10176 - DNA, 21 bp, Homo sapiens
cgttaattttratgttcagcc

SEQ ID NO: 10177 - DNA, 21 bp, Homo sapiens
caatgaaagayaaatggtggt

SEQ ID NO: 10178 - DNA, 21 bp, Homo sapiens
gtttctcaatmcttgagacaa

SEQ ID NO: 10179 - DNA, 21 bp, Homo sapiens
gaatacaatayaaaatggata

SEQ ID NO: 10180 - DNA, 21 bp, Homo sapiens
tgtttcattcrcattttggaa

SEQ ID NO: 10181 - DNA, 21 bp, Homo sapiens
gtgttattatygaagctcaca

SEQ ID NO: 10182 - DNA, 21 bp, Homo sapiens
aacattatgcyctattttcct

SEQ ID NO: 10183 - DNA, 21 bp, Homo sapiens
tgaagtagaayacaaacactg

SEQ ID NO: 10184 - DNA, 21 bp, Homo sapiens
ttcgtggttaygactttctag

SEQ ID NO: 10185 - DNA, 21 bp, Homo sapiens
ccaggtgtaastgttgaggag

SEQ ID NO: 10186 - DNA, 21 bp, Homo sapiens
aatactaaccrggtatcttca

SEQ ID NO: 10187 - DNA, 21 bp, Homo sapiens
aatgcaaattwtcaaggaacc

SEQ ID NO: 10188 - DNA, 21 bp, Homo sapiens
ctccctgcaaygagtgcaaat

SEQ ID NO: 10189 - DNA, 21 bp, Homo sapiens
attattcaggraacattttga

SEQ ID NO: 10190 - DNA, 21 bp, Homo sapiens
ttcttatatarttatagttgc

SEQ ID NO: 10191 - DNA, 21 bp, Homo sapiens
acttgaaatgwtcttacacag

SEQ ID NO: 10192 - DNA, 21 bp, Homo sapiens
taggatttctsttagatgcca

SEQ ID NO: 10193 - DNA, 21 bp, Homo sapiens
attagatacawtccttggttt

SEQ ID NO: 10194 - DNA, 21 bp, Homo sapiens
cacgtgttccygtctcaaaat

SEQ ID NO: 10195 - DNA, 21 bp, Homo sapiens
ttattcatgtktactttattt

SEQ ID NO: 10196 - DNA, 21 bp, Homo sapiens
gatattcttawctattagatt

SEQ ID NO: 10197 - DNA, 21 bp, Homo sapiens
aatgagactcractgacattt

SEQ ID NO: 10198 - DNA, 21 bp, Homo sapiens
aaggggcatgytttagccttc

SEQ ID NO: 10199 - DNA, 21 bp, Homo sapiens
gctattgtgtkttgcacttgg

SEQ ID NO: 10200 - DNA, 21 bp, Homo sapiens
tagaaatttgyaccttgaaat

SEQ ID NO: 10201 - DNA, 21 bp, Homo sapiens
cagtgttgctrtgtttaaggt

SEQ ID NO: 10202 - DNA, 21 bp, Homo sapiens
ttaattttggrgttggatcag

SEQ ID NO: 10203 - DNA, 21 bp, Homo sapiens
catggcatcasttggaacttt

SEQ ID NO: 10204 - DNA, 21 bp, Homo sapiens
aatagcaagayggcaaatgaa

SEQ ID NO: 10205 - DNA, 21 bp, Homo sapiens
gtgccaccatytttccttgct

SEQ ID NO: 10206 - DNA, 21 bp, Homo sapiens
ttagtaaaatmccaaaggctg

SEQ ID NO: 10207 - DNA, 21 bp, Homo sapiens
aacatataatsacagaaacaa

SEQ ID NO: 10208 - DNA, 21 bp, Homo sapiens
gaaaaaaagargctcagaaag

SEQ ID NO: 10209 - DNA, 21 bp, Homo sapiens
atctctcttcmtgctagacta

SEQ ID NO: 10210 - DNA, 21 bp, Homo sapiens
agcaaaacttygtaaaataat

SEQ ID NO: 10211 - DNA, 21 bp, Homo sapiens
tctgctaccamtttgaacctt

SEQ ID NO: 10212 - DNA, 21 bp, Homo sapiens
taaaggagggyggtcaaaaaa

SEQ ID NO: 10213 - DNA, 21 bp, Homo sapiens
taggcctcttyggatcaaatg

SEQ ID NO: 10214 - DNA, 21 bp, Homo sapiens
aattcttgctmtgggagcttt

SEQ ID NO: 10215 - DNA, 21 bp, Homo sapiens
ctgcctgattytacgcagtcc

SEQ ID NO: 10216 - DNA, 21 bp, Homo sapiens
ctagtttcctstgggacatta

SEQ ID NO: 10217 - DNA, 21 bp, Homo sapiens
acattcccatstaaggttaca

SEQ ID NO: 10218 - DNA, 21 bp, Homo sapiens
ttagatcactsccatttcact

SEQ ID NO: 10219 - DNA, 21 bp, Homo sapiens
gataaatcccyaatgtttatg

SEQ ID NO: 10220 - DNA, 21 bp, Homo sapiens
ttatgatagayatttttcaat

SEQ ID NO: 10221 - DNA, 21 bp, Homo sapiens
gcgtaagcttrggaccacaac

SEQ ID NO: 10222 - DNA, 21 bp, Homo sapiens
aaaatgttacyaatgttctag

SEQ ID NO: 10223 - DNA, 21 bp, Homo sapiens
acaaaagccayttgaagcaat

SEQ ID NO: 10224 - DNA, 21 bp, Homo sapiens
gaattaagaarttgggttaaa

SEQ ID NO: 10225 - DNA, 21 bp, Homo sapiens
agcagcacatkcaaggacatg

SEQ ID NO: 10226 - DNA, 21 bp, Homo sapiens
actgtttaagygagcctcaag

SEQ ID NO: 10227 - DNA, 21 bp, Homo sapiens
tctccgccatscctcacgctt

SEQ ID NO: 10228 - DNA, 21 bp, Homo sapiens
tttaagagcartagtcaataa

SEQ ID NO: 10229 - DNA, 21 bp, Homo sapiens
agtatagcttrcaataaacct

SEQ ID NO: 10230 - DNA, 21 bp, Homo sapiens
gcttttagtgraagaacatga

SEQ ID NO: 10231 - DNA, 21 bp, Homo sapiens
ttactgaaagragttaggtct

SEQ ID NO: 10232 - DNA, 21 bp, Homo sapiens
ttttcgggcastgtagttttc

SEQ ID NO: 10233 - DNA, 21 bp, Homo sapiens
aaaatcagttrtctcattgat

SEQ ID NO: 10234 - DNA, 21 bp, Homo sapiens
ttttgttagasgtttcatggt

SEQ ID NO: 10235 - DNA, 21 bp, Homo sapiens
attttctcctkaaaccttgat

SEQ ID NO: 10236 - DNA, 21 bp, Homo sapiens
aacaagagacragctctgaga

SEQ ID NO: 10237 - DNA, 21 bp, Homo sapiens
ccagagagtaktctgtttcac

SEQ ID NO: 10238 - DNA, 21 bp, Homo sapiens
gcctccttcaygtcgactcca

SEQ ID NO: 10239 - DNA, 21 bp, Homo sapiens
ttggctggtcrttgaggatac

SEQ ID NO: 10240 - DNA, 21 bp, Homo sapiens
tttatttcagytcccagttta

SEQ ID NO: 10241 - DNA, 21 bp, Homo sapiens
cttgacctctytagaattact

SEQ ID NO: 10242 - DNA, 21 bp, Homo sapiens
atttctttttyaatgaattgt

SEQ ID NO: 10243 - DNA, 21 bp, Homo sapiens
ttcaagtataygcagcaaagg

SEQ ID NO: 10244 - DNA, 21 bp, Homo sapiens
ttgttcttttsttttcatgtc

SEQ ID NO: 10245 - DNA, 21 bp, Homo sapiens
ttcctgtctcmacagaacaga

SEQ ID NO: 10246 - DNA, 21 bp, Homo sapiens
atatctttcaytggataaaaa

SEQ ID NO: 10247 - DNA, 21 bp, Homo sapiens
attttaacttkgctagttgtg

SEQ ID NO: 10248 - DNA, 21 bp, Homo sapiens
attatgttccraaaaacagga

SEQ ID NO: 10249 - DNA, 21 bp, Homo sapiens
tttgacaatarcattgtgctt

SEQ ID NO: 10250 - DNA, 21 bp, Homo sapiens
aagataaccartgtgtatttt

SEQ ID NO: 10251 - DNA, 21 bp, Homo sapiens
catcacagtgmaaaagaaaaa

SEQ ID NO: 10252 - DNA, 21 bp, Homo sapiens
aacataatcayactctgggga

SEQ ID NO: 10253 - DNA, 21 bp, Homo sapiens
ctatcaactgrgcaaatagag

SEQ ID NO: 10254 - DNA, 21 bp, Homo sapiens
agttactgacrtttcctcact

SEQ ID NO: 10255 - DNA, 21 bp, Homo sapiens
atgaactaggycagatggtta

SEQ ID NO: 10256 - DNA, 21 bp, Homo sapiens
agcagtgtcakgttaaagcca

SEQ ID NO: 10257 - DNA, 21 bp, Homo sapiens
tcaaggtggtrattattattc

SEQ ID NO: 10258 - DNA, 21 bp, Homo sapiens
agtcaaagatstgggttaaag

SEQ ID NO: 10259 - DNA, 21 bp, Homo sapiens
aattgtgaacrggaagaattt

SEQ ID NO: 10260 - DNA, 21 bp, Homo sapiens
ggaaaatacasagtaaatagt

SEQ ID NO: 10261 - DNA, 21 bp, Homo sapiens
tcagagtattmgctttgattt

SEQ ID NO: 10262 - DNA, 21 bp, Homo sapiens
gtggggtactyatgttagtgc

SEQ ID NO: 10263 - DNA, 21 bp, Homo sapiens
tattttacttyctaagcacaa

SEQ ID NO: 10264 - DNA, 21 bp, Homo sapiens
gtcacaatctrccattacgtt

SEQ ID NO: 10265 - DNA, 21 bp, Homo sapiens
agttaggaacyatctcagaga

SEQ ID NO: 10266 - DNA, 21 bp, Homo sapiens
caagatctttsacaatgtgtc

SEQ ID NO: 10267 - DNA, 21 bp, Homo sapiens
ccctgcagccraattaactaa

SEQ ID NO: 10268 - DNA, 21 bp, Homo sapiens
ggaagtgctcrgagctcattg

SEQ ID NO: 10269 - DNA, 21 bp, Homo sapiens
acagggaattktttctgaatc

SEQ ID NO: 10270 - DNA, 21 bp, Homo sapiens
ttaaaggtggmaatgcaggcc

SEQ ID NO: 10271 - DNA, 21 bp, Homo sapiens
acaagactatygtaaacacaa

SEQ ID NO: 10272 - DNA, 21 bp, Homo sapiens
ctcttcaaagygaattgtgtt

SEQ ID NO: 10273 - DNA, 21 bp, Homo sapiens
tgactgtgcartaatactcac

SEQ ID NO: 10274 - DNA, 21 bp, Homo sapiens
gtgattcacartgagagtgac

SEQ ID NO: 10275 - DNA, 21 bp, Homo sapiens
atctgaggatkatatatttat

SEQ ID NO: 10276 - DNA, 21 bp, Homo sapiens
gggttatgaascagagtggaa

SEQ ID NO: 10277 - DNA, 21 bp, Homo sapiens
gaaccaactcratgtatttga

SEQ ID NO: 10278 - DNA, 21 bp, Homo sapiens
ggtgaccttcygtcagggttc

SEQ ID NO: 10279 - DNA, 21 bp, Homo sapiens
tatcagcttgyggctttcctt

SEQ ID NO: 10280 - DNA, 21 bp, Homo sapiens
agcaatcatgragcaagcctg

SEQ ID NO: 10281 - DNA, 21 bp, Homo sapiens
tagtacacccktggggctaag

SEQ ID NO: 10282 - DNA, 21 bp, Homo sapiens
ctgtgcacaaytgaaagtgat

SEQ ID NO: 10283 - DNA, 21 bp, Homo sapiens
gttcagcatcracttagagtc

SEQ ID NO: 10284 - DNA, 21 bp, Homo sapiens
acacaaatgaytttgaattac

SEQ ID NO: 10285 - DNA, 21 bp, Homo sapiens
aagtgtttaasagaacttggc

SEQ ID NO: 10286 - DNA, 21 bp, Homo sapiens
tgaccatgctragataccttt

SEQ ID NO: 10287 - DNA, 21 bp, Homo sapiens
aaagacacatkgatttaatag

SEQ ID NO: 10288 - DNA, 21 bp, Homo sapiens
cttagaggggygaaaaaaaat

SEQ ID NO: 10289 - DNA, 21 bp, Homo sapiens
ccttatagaayaccctcgagt

SEQ ID NO: 10290 - DNA, 21 bp, Homo sapiens
agtctcttctmtttccaaccc

SEQ ID NO: 10291 - DNA, 21 bp, Homo sapiens
tttctaactgmtcctggtggg

SEQ ID NO: 10292 - DNA, 21 bp, Homo sapiens
acttcctacaytggatcagag

SEQ ID NO: 10293 - DNA, 21 bp, Homo sapiens
ttcacctagcraagaccttgg

SEQ ID NO: 10294 - DNA, 21 bp, Homo sapiens
cagatcatggyctagagtagc

SEQ ID NO: 10295 - DNA, 21 bp, Homo sapiens
tgcttccttcrgaggcccgag

SEQ ID NO: 10296 - DNA, 21 bp, Homo sapiens
acaatatcggraggtagaaaa

SEQ ID NO: 10297 - DNA, 21 bp, Homo sapiens
ggctgctagaytcacacagca

SEQ ID NO: 10298 - DNA, 21 bp, Homo sapiens
agaccaagagygctgagctcg

SEQ ID NO: 10299 - DNA, 21 bp, Homo sapiens
tgaaaaaactyacagtatcat

SEQ ID NO: 10300 - DNA, 21 bp, Homo sapiens
tgtgcacgagygtctgaacca

SEQ ID NO: 10301 - DNA, 21 bp, Homo sapiens
tttaggtgtamgaagaggtag

SEQ ID NO: 10302 - DNA, 21 bp, Homo sapiens
gggagaattgytacatcgaat

SEQ ID NO: 10303 - DNA, 21 bp, Homo sapiens
ggatgatcggsagaatataac

SEQ ID NO: 10304 - DNA, 21 bp, Homo sapiens
tcagccgttcyggagccttct

SEQ ID NO: 10305 - DNA, 21 bp, Homo sapiens
cgaggatgtgwttagagagct

SEQ ID NO: 10306 - DNA, 21 bp, Homo sapiens
gttgtggaacrtaagagtcaa

SEQ ID NO: 10307 - DNA, 21 bp, Homo sapiens
gggccatctcrtctcaatttc

SEQ ID NO: 10308 - DNA, 21 bp, Homo sapiens
gttcatcaatrgacaataata

SEQ ID NO: 10309 - DNA, 21 bp, Homo sapiens
gagagcatcaraattgtgaga

SEQ ID NO: 10310 - DNA, 21 bp, Homo sapiens
ttcttttcttsccaaatggca

SEQ ID NO: 10311 - DNA, 21 bp, Homo sapiens
ctatattctcygttttagctt

SEQ ID NO: 10312 - DNA, 21 bp, Homo sapiens
accaataaatrcacctgcttg

SEQ ID NO: 10313 - DNA, 21 bp, Homo sapiens
taacagaaaaygatgatgatg

SEQ ID NO: 10314 - DNA, 21 bp, Homo sapiens
aatctgttatytcctttcaca

SEQ ID NO: 10315 - DNA, 21 bp, Homo sapiens
gtcattggctkgtggctcact

SEQ ID NO: 10316 - DNA, 21 bp, Homo sapiens
ttaaagataasacaaagtcaa

SEQ ID NO: 10317 - DNA, 21 bp, Homo sapiens
tggttagtgayggagcaataa

SEQ ID NO: 10318 - DNA, 21 bp, Homo sapiens
tcaattataarttttctttct

SEQ ID NO: 10319 - DNA, 21 bp, Homo sapiens
attgtgtatgyatgcgtcatg

SEQ ID NO: 10320 - DNA, 21 bp, Homo sapiens
tgctaactcayacacccgtga

SEQ ID NO: 10321 - DNA, 21 bp, Homo sapiens
acaataagctstgtatgggga

SEQ ID NO: 10322 - DNA, 21 bp, Homo sapiens
taagaagatgytgattaaatt

SEQ ID NO: 10323 - DNA, 21 bp, Homo sapiens
aaggcagaacmagctaatagc

SEQ ID NO: 10324 - DNA, 21 bp, Homo sapiens
gtttttatcayagcaaaaaat

SEQ ID NO: 10325 - DNA, 21 bp, Homo sapiens
acctggctctrttaggagcat

SEQ ID NO: 10326 - DNA, 21 bp, Homo sapiens
tcctcttgtcrtacttcactt

SEQ ID NO: 10327 - DNA, 21 bp, Homo sapiens
caaagttaatrtaagacacaa

SEQ ID NO: 10328 - DNA, 21 bp, Homo sapiens
tgtggtctttygaactccagt

SEQ ID NO: 10329 - DNA, 21 bp, Homo sapiens
gttttctggartattcagcaa

SEQ ID NO: 10330 - DNA, 21 bp, Homo sapiens
tactttattawtattatattt

SEQ ID NO: 10331 - DNA, 21 bp, Homo sapiens
aaattgagacygagaggaagt

SEQ ID NO: 10332 - DNA, 21 bp, Homo sapiens
ccagaatgacygcaggaatac

SEQ ID NO: 10333 - DNA, 21 bp, Homo sapiens
tttacacagawcccttctact

SEQ ID NO: 10334 - DNA, 21 bp, Homo sapiens
cgagattagcwctccatacca

SEQ ID NO: 10335 - DNA, 21 bp, Homo sapiens
taatatgttgmttcctttcct

SEQ ID NO: 10336 - DNA, 21 bp, Homo sapiens
actaaaatacrtattcccaaa

SEQ ID NO: 10337 - DNA, 21 bp, Homo sapiens
gcaggtttacyatatggaaat

SEQ ID NO: 10338 - DNA, 21 bp, Homo sapiens
ggttttgctcytcctgggcag

SEQ ID NO: 10339 - DNA, 21 bp, Homo sapiens
tcacggcactkagttatagca

SEQ ID NO: 10340 - DNA, 21 bp, Homo sapiens
ttgaaaaggaytgaataaaca

SEQ ID NO: 10341 - DNA, 21 bp, Homo sapiens
ttctacacatraacttccaga

SEQ ID NO: 10342 - DNA, 21 bp, Homo sapiens
cagtctagaawggtgcaggaa

SEQ ID NO: 10343 - DNA, 21 bp, Homo sapiens
tataatgtttytagtctggta

SEQ ID NO: 10344 - DNA, 21 bp, Homo sapiens
caagttgtgaraaacgcagat

SEQ ID NO: 10345 - DNA, 21 bp, Homo sapiens
tatatcttgayagctacacat

SEQ ID NO: 10346 - DNA, 21 bp, Homo sapiens
ttatgtaaggytcaagacgag

SEQ ID NO: 10347 - DNA, 21 bp, Homo sapiens
cagcaggcttygtctaatgtt

SEQ ID NO: 10348 - DNA, 21 bp, Homo sapiens
tttagcactartctttaacgt

SEQ ID NO: 10349 - DNA, 21 bp, Homo sapiens
taggaaatgtraggttgtgtc

SEQ ID NO: 10350 - DNA, 21 bp, Homo sapiens
ttgggaaaatyagtgttctaa

SEQ ID NO: 10351 - DNA, 21 bp, Homo sapiens
tgccagcattytggtaggttt

SEQ ID NO: 10352 - DNA, 21 bp, Homo sapiens
atggcagattrctggtgtgaa

SEQ ID NO: 10353 - DNA, 21 bp, Homo sapiens
aagagtctacrttcttctctt

SEQ ID NO: 10354 - DNA, 21 bp, Homo sapiens
ctttagacaaygcaaaatctg

SEQ ID NO: 10355 - DNA, 21 bp, Homo sapiens
atttagatagytttctgggta

SEQ ID NO: 10356 - DNA, 21 bp, Homo sapiens
agtcactaatyttcagcaaat

SEQ ID NO: 10357 - DNA, 21 bp, Homo sapiens
gttcagccctrtggaaatttg

SEQ ID NO: 10358 - DNA, 21 bp, Homo sapiens
tggatggtctstaaatacttc

SEQ ID NO: 10359 - DNA, 21 bp, Homo sapiens
gcttagtctaragagtggatt

SEQ ID NO: 10360 - DNA, 21 bp, Homo sapiens
ttgcaactgawctttgtttac

SEQ ID NO: 10361 - DNA, 21 bp, Homo sapiens
caaataggcaycttctattat

SEQ ID NO: 10362 - DNA, 21 bp, Homo sapiens
ttttgagaacrcagagcacta

SEQ ID NO: 10363 - DNA, 21 bp, Homo sapiens
gtggcaaacamagatgtggaa

SEQ ID NO: 10364 - DNA, 21 bp, Homo sapiens
tccagcccagygccaggatca

SEQ ID NO: 10365 - DNA, 21 bp, Homo sapiens
ctttgctaagyaccatttctc

SEQ ID NO: 10366 - DNA, 21 bp, Homo sapiens
acagatgagcyttccaagagt

SEQ ID NO: 10367 - DNA, 21 bp, Homo sapiens
ctgcctatgtyacagttagtg

SEQ ID NO: 10368 - DNA, 21 bp, Homo sapiens
cctgcaaaagwgaattgttgc

SEQ ID NO: 10369 - DNA, 21 bp, Homo sapiens
agctactcccrttctgctccc

SEQ ID NO: 10370 - DNA, 21 bp, Homo sapiens
atagccaaggrcctgacatct

SEQ ID NO: 10371 - DNA, 21 bp, Homo sapiens
gtctgaattcytgtagagttg

SEQ ID NO: 10372 - DNA, 21 bp, Homo sapiens
tggagagagcrcaacctgcag

SEQ ID NO: 10373 - DNA, 21 bp, Homo sapiens
ttggatttctsttcctagttc

SEQ ID NO: 10374 - DNA, 21 bp, Homo sapiens
tgtgggaaatsagctcacgta

SEQ ID NO: 10375 - DNA, 21 bp, Homo sapiens
tattggccaawtcttatcgtt

SEQ ID NO: 10376 - DNA, 21 bp, Homo sapiens
tgattttcttycacagttggg

SEQ ID NO: 10377 - DNA, 21 bp, Homo sapiens
agaaggattcrtagaaagatg

SEQ ID NO: 10378 - DNA, 21 bp, Homo sapiens
ggggcaaactracatagtcat

SEQ ID NO: 10379 - DNA, 21 bp, Homo sapiens
agaattcttcyaccagtgatt

SEQ ID NO: 10380 - DNA, 21 bp, Homo sapiens
catatatgagraatcatctgg

SEQ ID NO: 10381 - DNA, 21 bp, Homo sapiens
gttcaactggraagtttgcag

SEQ ID NO: 10382 - DNA, 21 bp, Homo sapiens
cacggggacaygaactagaag

SEQ ID NO: 10383 - DNA, 21 bp, Homo sapiens
tgaaacaaagrcagtgacccc

SEQ ID NO: 10384 - DNA, 21 bp, Homo sapiens
agccttcaaamctgagctagc

SEQ ID NO: 10385 - DNA, 21 bp, Homo sapiens
ggtgtgaacgraagtgctgtg

SEQ ID NO: 10386 - DNA, 21 bp, Homo sapiens
gcataattcayggatttactc

SEQ ID NO: 10387 - DNA, 21 bp, Homo sapiens
attctaattaracacctccct

SEQ ID NO: 10388 - DNA, 21 bp, Homo sapiens
aggtcttcaaktagccataca

SEQ ID NO: 10389 - DNA, 21 bp, Homo sapiens
tttgggtcaayaatcaaacaa

SEQ ID NO: 10390 - DNA, 21 bp, Homo sapiens
gcagatgaccrtggaaaggac

SEQ ID NO: 10391 - DNA, 21 bp, Homo sapiens
tggaggaagakaatataatcc

SEQ ID NO: 10392 - DNA, 21 bp, Homo sapiens
ggcggctaggyagcaaccaag

SEQ ID NO: 10393 - DNA, 21 bp, Homo sapiens
gcctattcatrtaacttcaaa

SEQ ID NO: 10394 - DNA, 21 bp, Homo sapiens
tggattctackacttgtacta

SEQ ID NO: 10395 - DNA, 21 bp, Homo sapiens
gtacagaaacragctgggagg

SEQ ID NO: 10396 - DNA, 21 bp, Homo sapiens
gagtgctttgyctttgggaca

SEQ ID NO: 10397 - DNA, 21 bp, Homo sapiens
ccttcaaccargtaacataat

SEQ ID NO: 10398 - DNA, 21 bp, Homo sapiens
taggagcaggygactcaccac

SEQ ID NO: 10399 - DNA, 21 bp, Homo sapiens
tataaaataarggttttcaaa

SEQ ID NO: 10400 - DNA, 21 bp, Homo sapiens
tacatcagcascaggcttcac

SEQ ID NO: 10401 - DNA, 21 bp, Homo sapiens
ctccatttttmagccctctgc

SEQ ID NO: 10402 - DNA, 21 bp, Homo sapiens
gaaatctgtawggaactgaca

SEQ ID NO: 10403 - DNA, 21 bp, Homo sapiens
cagttccattwtctcagtctg

SEQ ID NO: 10404 - DNA, 21 bp, Homo sapiens
tagagcaccayatttaatgaa

SEQ ID NO: 10405 - DNA, 21 bp, Homo sapiens
cagatacccaraagaattgaa

SEQ ID NO: 10406 - DNA, 21 bp, Homo sapiens
tttggaaaacycagaaaagca

SEQ ID NO: 10407 - DNA, 21 bp, Homo sapiens
gcatagcgccrggcacctgga

SEQ ID NO: 10408 - DNA, 21 bp, Homo sapiens
tagctattatstttggcttat

SEQ ID NO: 10409 - DNA, 21 bp, Homo sapiens
ccatcctgccrtgtaacttgt

SEQ ID NO: 10410 - DNA, 21 bp, Homo sapiens
ctgcaactaaytgaataaaca

SEQ ID NO: 10411 - DNA, 21 bp, Homo sapiens
gaggattcacrgagagaggaa

SEQ ID NO: 10412 - DNA, 21 bp, Homo sapiens
gagtatgataygttttgtcat

SEQ ID NO: 10413 - DNA, 21 bp, Homo sapiens
gctgagctggrtcaccactgt

SEQ ID NO: 10414 - DNA, 21 bp, Homo sapiens
tagcctttaayggagctgttt

SEQ ID NO: 10415 - DNA, 21 bp, Homo sapiens
atagacatcayaaagattaag

SEQ ID NO: 10416 - DNA, 21 bp, Homo sapiens
aaaggaatcayaaatgcagac

SEQ ID NO: 10417 - DNA, 21 bp, Homo sapiens
tcttataaaayactagtcaac

SEQ ID NO: 10418 - DNA, 21 bp, Homo sapiens
ttgtatatgcygccatgctat

SEQ ID NO: 10419 - DNA, 21 bp, Homo sapiens
tatggcaatcyagtgctggag

SEQ ID NO: 10420 - DNA, 21 bp, Homo sapiens
ctcaggacaastgtagatgct

SEQ ID NO: 10421 - DNA, 21 bp, Homo sapiens
taatcttcagygtaaaggaag

SEQ ID NO: 10422 - DNA, 21 bp, Homo sapiens
aaatgttattktccctacctt

SEQ ID NO: 10423 - DNA, 21 bp, Homo sapiens
tgatactgatrcttacctctt

SEQ ID NO: 10424 - DNA, 21 bp, Homo sapiens
gatcaggttcygttttttttc

SEQ ID NO: 10425 - DNA, 21 bp, Homo sapiens
gtacaattttkgtttttcaaa

SEQ ID NO: 10426 - DNA, 21 bp, Homo sapiens
tttaaaatagmatgagttaga

SEQ ID NO: 10427 - DNA, 21 bp, Homo sapiens
acagtgtgtawggcattagaa

SEQ ID NO: 10428 - DNA, 21 bp, Homo sapiens
actttttactragcctgagaa

SEQ ID NO: 10429 - DNA, 21 bp, Homo sapiens
atgttatttgyttctcctcca

SEQ ID NO: 10430 - DNA, 21 bp, Homo sapiens
agcaattgttrttactacatt

SEQ ID NO: 10431 - DNA, 21 bp, Homo sapiens
tatttttttcrttgatcagta

SEQ ID NO: 10432 - DNA, 21 bp, Homo sapiens
tgacccggtgrcaagaatgag

SEQ ID NO: 10433 - DNA, 21 bp, Homo sapiens
gaagaaacagraaatcagaga

SEQ ID NO: 10434 - DNA, 21 bp, Homo sapiens
agtagtgaacrccagcacata

SEQ ID NO: 10435 - DNA, 21 bp, Homo sapiens
ctaccataaamccttgtaccc

SEQ ID NO: 10436 - DNA, 21 bp, Homo sapiens
gtctttcactscctttagtgt

SEQ ID NO: 10437 - DNA, 21 bp, Homo sapiens
agagaatcctraggtttaagt

SEQ ID NO: 10438 - DNA, 21 bp, Homo sapiens
ttttggtgttyggaggtttgg

SEQ ID NO: 10439 - DNA, 21 bp, Homo sapiens
ggaaagtaagygttaccattg

SEQ ID NO: 10440 - DNA, 21 bp, Homo sapiens
aaaaattcacrgaaacttaat

SEQ ID NO: 10441 - DNA, 21 bp, Homo sapiens
ggatctcctamgtgtccaaca

SEQ ID NO: 10442 - DNA, 21 bp, Homo sapiens
tacaaattagkatttattcta

SEQ ID NO: 10443 - DNA, 21 bp, Homo sapiens
ttttgtgataygagagcaagt

SEQ ID NO: 10444 - DNA, 21 bp, Homo sapiens
gatgtggatgygcagtgagac

SEQ ID NO: 10445 - DNA, 21 bp, Homo sapiens
gctgtgatgtyggttgtcact

SEQ ID NO: 10446 - DNA, 21 bp, Homo sapiens
acagatacttkagattttttt

SEQ ID NO: 10447 - DNA, 21 bp, Homo sapiens
tgggatttagsaaaacgtcag

SEQ ID NO: 10448 - DNA, 21 bp, Homo sapiens
ccatactgccrgaggtgaagg

SEQ ID NO: 10449 - DNA, 21 bp, Homo sapiens
cccaaaaagaygtatgaacac

SEQ ID NO: 10450 - DNA, 21 bp, Homo sapiens
ttggttggtayattttatgtc

SEQ ID NO: 10451 - DNA, 21 bp, Homo sapiens
agtttcaaaascagaaataat

SEQ ID NO: 10452 - DNA, 21 bp, Homo sapiens
tgtatgtttgrgaaatgagat

SEQ ID NO: 10453 - DNA, 21 bp, Homo sapiens
tggctttatgwctgtacccat

SEQ ID NO: 10454 - DNA, 21 bp, Homo sapiens
aatgtgcctcrtgtaaagatc

SEQ ID NO: 10455 - DNA, 21 bp, Homo sapiens
ttttcattcawgtttccccaa

SEQ ID NO: 10456 - DNA, 21 bp, Homo sapiens
ttatggatggygatataactg

SEQ ID NO: 10457 - DNA, 21 bp, Homo sapiens
aggaagggaaygtgtattaag

SEQ ID NO: 10458 - DNA, 21 bp, Homo sapiens
agtcagtcatrttgctttatg

SEQ ID NO: 10459 - DNA, 21 bp, Homo sapiens
taaggtttttragtgcatttg

SEQ ID NO: 10460 - DNA, 21 bp, Homo sapiens
gttagcttttstaaatgaaac

SEQ ID NO: 10461 - DNA, 21 bp, Homo sapiens
aagtattgttyttccatgaat

SEQ ID NO: 10462 - DNA, 21 bp, Homo sapiens
gatactgtctrtgaaatattt

SEQ ID NO: 10463 - DNA, 21 bp, Homo sapiens
agtttggcttygaaatccatg

SEQ ID NO: 10464 - DNA, 21 bp, Homo sapiens
tgtctataaamctcttactgg

SEQ ID NO: 10465 - DNA, 21 bp, Homo sapiens
caacagcagakttaacatgcg

SEQ ID NO: 10466 - DNA, 21 bp, Homo sapiens
tttgcaacccytaaccttctg

SEQ ID NO: 10467 - DNA, 21 bp, Homo sapiens
cagatgaaatrtaacaaagcc

SEQ ID NO: 10468 - DNA, 21 bp, Homo sapiens
actctgtttgytaggattgtg

SEQ ID NO: 10469 - DNA, 21 bp, Homo sapiens
ctttctcattmtcaaatatac

SEQ ID NO: 10470 - DNA, 21 bp, Homo sapiens
actaggtagcygtgaggtcac

SEQ ID NO: 10471 - DNA, 21 bp, Homo sapiens
ggagcagactrtgaaatgtac

SEQ ID NO: 10472 - DNA, 21 bp, Homo sapiens
ttggttctttrttagcgagtg

SEQ ID NO: 10473 - DNA, 21 bp, Homo sapiens
ttattggcaawttggtcccta

SEQ ID NO: 10474 - DNA, 21 bp, Homo sapiens
atattcaggcytggagaattg

SEQ ID NO: 10475 - DNA, 21 bp, Homo sapiens
ataagcttctraggaacttca

SEQ ID NO: 10476 - DNA, 21 bp, Homo sapiens
taaattagtcmttttacataa

SEQ ID NO: 10477 - DNA, 21 bp, Homo sapiens
tgtactaagaytatttttaaa

SEQ ID NO: 10478 - DNA, 21 bp, Homo sapiens
gttacaagaarcagaccaatg

SEQ ID NO: 10479 - DNA, 21 bp, Homo sapiens
ctgaaaggatratttgatatt

SEQ ID NO: 10480 - DNA, 21 bp, Homo sapiens
gcatctaaacrcaagttcaaa

SEQ ID NO: 10481 - DNA, 21 bp, Homo sapiens
gtttatatggytctgtcactt

SEQ ID NO: 10482 - DNA, 21 bp, Homo sapiens
tgctttaaatyagaagtgttc

SEQ ID NO: 10483 - DNA, 21 bp, Homo sapiens
aaagtcataayggtgtccttg

SEQ ID NO: 10484 - DNA, 21 bp, Homo sapiens
ttgttgagaayatttttccaa

SEQ ID NO: 10485 - DNA, 21 bp, Homo sapiens
aacttacagcrtatgcctaac

SEQ ID NO: 10486 - DNA, 21 bp, Homo sapiens
ggcacagactkgtattgaaag

SEQ ID NO: 10487 - DNA, 21 bp, Homo sapiens
accacatgccrtgataaattg

SEQ ID NO: 10488 - DNA, 21 bp, Homo sapiens
attcagagtascctttcagag

SEQ ID NO: 10489 - DNA, 21 bp, Homo sapiens
agtcaacaagraatttcgatg

SEQ ID NO: 10490 - DNA, 21 bp, Homo sapiens
ttcctgtggtrtaagtattgt

SEQ ID NO: 10491 - DNA, 21 bp, Homo sapiens
attatctttcrctttggttta

SEQ ID NO: 10492 - DNA, 21 bp, Homo sapiens
gtcatgttccrtcccattttg

SEQ ID NO: 10493 - DNA, 21 bp, Homo sapiens
tggataaatcraacctttatt

SEQ ID NO: 10494 - DNA, 21 bp, Homo sapiens
ctaacgacacrcaattgccta

SEQ ID NO: 10495 - DNA, 21 bp, Homo sapiens
attaatttgcrtattcctacc

SEQ ID NO: 10496 - DNA, 21 bp, Homo sapiens
ttgactacttsacatactcaa

SEQ ID NO: 10497 - DNA, 21 bp, Homo sapiens
cctgctatgamatgaaagcct

SEQ ID NO: 10498 - DNA, 21 bp, Homo sapiens
tggtaggctcrtaagtagatt

SEQ ID NO: 10499 - DNA, 21 bp, Homo sapiens
gcaacttgaamcactggcttc

SEQ ID NO: 10500 - DNA, 21 bp, Homo sapiens
gacaggagcaratgagaagtt

SEQ ID NO: 10501 - DNA, 21 bp, Homo sapiens
gagttctaagwggagagaaag

SEQ ID NO: 10502 - DNA, 21 bp, Homo sapiens
gctctaaaacrttagatttgt

SEQ ID NO: 10503 - DNA, 21 bp, Homo sapiens
tttaccttccytcattcaaat

SEQ ID NO: 10504 - DNA, 21 bp, Homo sapiens
ccggagttgayaaattgacat

SEQ ID NO: 10505 - DNA, 21 bp, Homo sapiens
ggttttgtacrtattaacaca

SEQ ID NO: 10506 - DNA, 21 bp, Homo sapiens
aatagcttaarggacttacct

SEQ ID NO: 10507 - DNA, 21 bp, Homo sapiens
tgacacacttyaaggtttttc

SEQ ID NO: 10508 - DNA, 21 bp, Homo sapiens
attattgacckgattaagtgt

SEQ ID NO: 10509 - DNA, 21 bp, Homo sapiens
agcacccacaygtgaaagtgc

SEQ ID NO: 10510 - DNA, 21 bp, Homo sapiens
atccacactcytcccctaaac

SEQ ID NO: 10511 - DNA, 21 bp, Homo sapiens
ccagactcttrgatgagatta

SEQ ID NO: 10512 - DNA, 21 bp, Homo sapiens
aatctgtattwcatgcagccc

SEQ ID NO: 10513 - DNA, 21 bp, Homo sapiens
gtggtatctgkattctggcca

SEQ ID NO: 10514 - DNA, 21 bp, Homo sapiens
gttagattaartacaggcctc

SEQ ID NO: 10515 - DNA, 21 bp, Homo sapiens
aaaaatgactscatgtaacta

SEQ ID NO: 10516 - DNA, 21 bp, Homo sapiens
tttaaaaaggytttcagcatt

SEQ ID NO: 10517 - DNA, 21 bp, Homo sapiens
cccaatactcyctagtgcagc

SEQ ID NO: 10518 - DNA, 21 bp, Homo sapiens
cctagaatgcrgtttctcatt

SEQ ID NO: 10519 - DNA, 21 bp, Homo sapiens
gatttcaatawcctattttca

SEQ ID NO: 10520 - DNA, 21 bp, Homo sapiens
tgggatgataygatgattgtg

SEQ ID NO: 10521 - DNA, 21 bp, Homo sapiens
aatgtgtagcwcaaattgtca

SEQ ID NO: 10522 - DNA, 21 bp, Homo sapiens
caaacattaaytgcaagcctc

SEQ ID NO: 10523 - DNA, 21 bp, Homo sapiens
ttcctggctgrtcgtagacaa

SEQ ID NO: 10524 - DNA, 21 bp, Homo sapiens
tgtagcaaaaygaaaagggca

SEQ ID NO: 10525 - DNA, 21 bp, Homo sapiens
acacatccctractgtctgcc

SEQ ID NO: 10526 - DNA, 21 bp, Homo sapiens
atatcaaccakcactccaaca

SEQ ID NO: 10527 - DNA, 21 bp, Homo sapiens
gaattataaarttgccagctg

SEQ ID NO: 10528 - DNA, 21 bp, Homo sapiens
atgctgtaacrgaaccacctg

SEQ ID NO: 10529 - DNA, 21 bp, Homo sapiens
atacttttgcyagtggcttgc

SEQ ID NO: 10530 - DNA, 21 bp, Homo sapiens
taggacaaggrctcttaaccc

SEQ ID NO: 10531 - DNA, 21 bp, Homo sapiens
ataaggaagamaagctgaatg

SEQ ID NO: 10532 - DNA, 21 bp, Homo sapiens
gggtctgcacygcaagttgta

SEQ ID NO: 10533 - DNA, 21 bp, Homo sapiens
gaagacagggktattatcttg

SEQ ID NO: 10534 - DNA, 21 bp, Homo sapiens
caagagtacayaaagataatg

SEQ ID NO: 10535 - DNA, 21 bp, Homo sapiens
taatttgaatrtcacttggaa

SEQ ID NO: 10536 - DNA, 21 bp, Homo sapiens
tctgaacactrtcctgacata

SEQ ID NO: 10537 - DNA, 21 bp, Homo sapiens
ctcaaagcccraatagttcca

SEQ ID NO: 10538 - DNA, 21 bp, Homo sapiens
agtttgctcarttaccctttt

SEQ ID NO: 10539 - DNA, 21 bp, Homo sapiens
acttcttttamggatgatgat

SEQ ID NO: 10540 - DNA, 21 bp, Homo sapiens
atcacatttawttttctcaaa

SEQ ID NO: 10541 - DNA, 21 bp, Homo sapiens
tttactcttaygtgaaaggct

SEQ ID NO: 10542 - DNA, 21 bp, Homo sapiens
acagtgacatrccacaggcca

SEQ ID NO: 10543 - DNA, 21 bp, Homo sapiens
ggaaaaggttrtgattgcgat

SEQ ID NO: 10544 - DNA, 21 bp, Homo sapiens
tcagagaaaawcatgtcatta

SEQ ID NO: 10545 - DNA, 21 bp, Homo sapiens
ttggtgagtcyctgcatgtaa

SEQ ID NO: 10546 - DNA, 21 bp, Homo sapiens
gctcacagatrtggaaatttt

SEQ ID NO: 10547 - DNA, 21 bp, Homo sapiens
ttacatgccartacctttcct

SEQ ID NO: 10548 - DNA, 21 bp, Homo sapiens
atgtaactcarcaatctactt

SEQ ID NO: 10549 - DNA, 21 bp, Homo sapiens
atgaacctctstttgaagcta

SEQ ID NO: 10550 - DNA, 21 bp, Homo sapiens
aatcaacattsagtcagttcc

SEQ ID NO: 10551 - DNA, 21 bp, Homo sapiens
tacaaaatctycagagcatct

SEQ ID NO: 10552 - DNA, 21 bp, Homo sapiens
actgcaaatckgccactctga

SEQ ID NO: 10553 - DNA, 21 bp, Homo sapiens
aaacggtggaytgtaaacctg

SEQ ID NO: 10554 - DNA, 21 bp, Homo sapiens
caaatgcccartgtgattcag

SEQ ID NO: 10555 - DNA, 21 bp, Homo sapiens
ttaaccaaagrgaaagtaaaa

SEQ ID NO: 10556 - DNA, 21 bp, Homo sapiens
cttaatcctckcttcacctag

SEQ ID NO: 10557 - DNA, 21 bp, Homo sapiens
ttgaagataartaatgtgaat

SEQ ID NO: 10558 - DNA, 21 bp, Homo sapiens
aagtggcactyagaattaagt

SEQ ID NO: 10559 - DNA, 21 bp, Homo sapiens
tatcctcatcsttagccacac

SEQ ID NO: 10560 - DNA, 21 bp, Homo sapiens
agcctaaaatrttttattata

SEQ ID NO: 10561 - DNA, 21 bp, Homo sapiens
gtggcagtatytataaacaga

SEQ ID NO: 10562 - DNA, 21 bp, Homo sapiens
tttagtggaaygttggataaa

SEQ ID NO: 10563 - DNA, 21 bp, Homo sapiens
caaacttccaytgaattcttg

SEQ ID NO: 10564 - DNA, 21 bp, Homo sapiens
aacccaagagrtaaaaaacat

SEQ ID NO: 10565 - DNA, 21 bp, Homo sapiens
tgtatatatamcacagggaac

SEQ ID NO: 10566 - DNA, 21 bp, Homo sapiens
atatgtatgargggtactcca

SEQ ID NO: 10567 - DNA, 21 bp, Homo sapiens
atagtatagayaaaaattgct

SEQ ID NO: 10568 - DNA, 21 bp, Homo sapiens
tattggtaagratcttggtac

SEQ ID NO: 10569 - DNA, 21 bp, Homo sapiens
atgatcctgaygtgattctaa

SEQ ID NO: 10570 - DNA, 21 bp, Homo sapiens
acagtgtgtcrgctaaactcc

SEQ ID NO: 10571 - DNA, 21 bp, Homo sapiens
gcaaggaaacrtaatgaatgt

SEQ ID NO: 10572 - DNA, 21 bp, Homo sapiens
atgggaatgcrtagaagcaat

SEQ ID NO: 10573 - DNA, 21 bp, Homo sapiens
tttcctgaaartggctgaaga

SEQ ID NO: 10574 - DNA, 21 bp, Homo sapiens
tctagtaacamgtcttgaaac

SEQ ID NO: 10575 - DNA, 21 bp, Homo sapiens
atttagggttrtctctcacat

SEQ ID NO: 10576 - DNA, 21 bp, Homo sapiens
ggcttaaaggrcttatccagt

SEQ ID NO: 10577 - DNA, 21 bp, Homo sapiens
gtgacagtgayttctccatgg

SEQ ID NO: 10578 - DNA, 21 bp, Homo sapiens
tagcagtttawtcaacactct

SEQ ID NO: 10579 - DNA, 21 bp, Homo sapiens
aaacacactasacatgcaaaa

SEQ ID NO: 10580 - DNA, 21 bp, Homo sapiens
gattacatttwtcaactgcta

SEQ ID NO: 10581 - DNA, 21 bp, Homo sapiens
atcagtaagcycctaaagcct

SEQ ID NO: 10582 - DNA, 21 bp, Homo sapiens
ctacacttcawgtctctgtgg

SEQ ID NO: 10583 - DNA, 21 bp, Homo sapiens
gtttctccaaktaacaactgg

SEQ ID NO: 10584 - DNA, 21 bp, Homo sapiens
aatttcaatgkgataagtttc

SEQ ID NO: 10585 - DNA, 21 bp, Homo sapiens
tgaataccgcygaaatggtgc

SEQ ID NO: 10586 - DNA, 21 bp, Homo sapiens
caagggccctmaagtttctct

SEQ ID NO: 10587 - DNA, 21 bp, Homo sapiens
gtcattaattyatttagcaag

SEQ ID NO: 10588 - DNA, 21 bp, Homo sapiens
tcctgatttaytgataagcag

SEQ ID NO: 10589 - DNA, 21 bp, Homo sapiens
cttttagatgytactatacct

SEQ ID NO: 10590 - DNA, 21 bp, Homo sapiens
ttttaaatggyaagcttttga

SEQ ID NO: 10591 - DNA, 21 bp, Homo sapiens
aaccataccamcctcactgac

SEQ ID NO: 10592 - DNA, 21 bp, Homo sapiens
tgtaaaatggrtaagccaaat

SEQ ID NO: 10593 - DNA, 21 bp, Homo sapiens
aataaaaatgycagtctattg

SEQ ID NO: 10594 - DNA, 21 bp, Homo sapiens
tgaggagtacrtatttgtttg

SEQ ID NO: 10595 - DNA, 21 bp, Homo sapiens
ctctgtgaccrcccacctgat

SEQ ID NO: 10596 - DNA, 21 bp, Homo sapiens
gttgactagcragatcactgt

SEQ ID NO: 10597 - DNA, 21 bp, Homo sapiens
atctttctatktctcagaacc

SEQ ID NO: 10598 - DNA, 21 bp, Homo sapiens
tctcagacaarcagtgcaatt

SEQ ID NO: 10599 - DNA, 21 bp, Homo sapiens
acttttttatycttataaatt

SEQ ID NO: 10600 - DNA, 21 bp, Homo sapiens
aactaaaatamgtatcaaaat

SEQ ID NO: 10601 - DNA, 21 bp, Homo sapiens
ttttatttctsactgtcaatt

SEQ ID NO: 10602 - DNA, 21 bp, Homo sapiens
attcttggtcrtcttttcttg

SEQ ID NO: 10603 - DNA, 21 bp, Homo sapiens
tttgtgattaratgaagcaat

SEQ ID NO: 10604 - DNA, 21 bp, Homo sapiens
tagtcacaccrgacccccagt

SEQ ID NO: 10605 - DNA, 21 bp, Homo sapiens
cattttaatcrgtttctcaat

SEQ ID NO: 10606 - DNA, 21 bp, Homo sapiens
tattcttttaygactttgaat

SEQ ID NO: 10607 - DNA, 21 bp, Homo sapiens
catataaaacrggccactgag

SEQ ID NO: 10608 - DNA, 21 bp, Homo sapiens
ttttaacaagrcttcacatga

SEQ ID NO: 10609 - DNA, 21 bp, Homo sapiens
attacgtcatrgccagcatgg

SEQ ID NO: 10610 - DNA, 21 bp, Homo sapiens
atgtacaaacrtttgcaatta

SEQ ID NO: 10611 - DNA, 21 bp, Homo sapiens
cgtacacacasagctgagcca

SEQ ID NO: 10612 - DNA, 21 bp, Homo sapiens
taacatacttmattcaaacag

SEQ ID NO: 10613 - DNA, 21 bp, Homo sapiens
tagcctacccragcaagtcag

SEQ ID NO: 10614 - DNA, 21 bp, Homo sapiens
aatccttgctytggaaaacca

SEQ ID NO: 10615 - DNA, 21 bp, Homo sapiens
tctgtgcaaayaaatgacaat

SEQ ID NO: 10616 - DNA, 21 bp, Homo sapiens
ccactttctgkttcctgagat

SEQ ID NO: 10617 - DNA, 21 bp, Homo sapiens
catccaagaasaagagagata

SEQ ID NO: 10618 - DNA, 21 bp, Homo sapiens
tttattaccayaagaaaggca

SEQ ID NO: 10619 - DNA, 21 bp, Homo sapiens
ttcaagctttscattaatgta

SEQ ID NO: 10620 - DNA, 21 bp, Homo sapiens
tagtagggagscttattcata

SEQ ID NO: 10621 - DNA, 21 bp, Homo sapiens
aattttcagtktagattttag

SEQ ID NO: 10622 - DNA, 21 bp, Homo sapiens
gggagctgagrcacgaaagtg

SEQ ID NO: 10623 - DNA, 21 bp, Homo sapiens
tcccaattggyagaaaatgac

SEQ ID NO: 10624 - DNA, 21 bp, Homo sapiens
tttgatagcaygattttataa

SEQ ID NO: 10625 - DNA, 21 bp, Homo sapiens
tagtcttttcwcctccactgt

SEQ ID NO: 10626 - DNA, 21 bp, Homo sapiens
tttaaatgggmtagtgagact

SEQ ID NO: 10627 - DNA, 21 bp, Homo sapiens
gagatttcaarccaggcagtg

SEQ ID NO: 10628 - DNA, 21 bp, Homo sapiens
ggtgtttctcytaccattcag

SEQ ID NO: 10629 - DNA, 21 bp, Homo sapiens
ttttggactgsccatctcagc

SEQ ID NO: 10630 - DNA, 21 bp, Homo sapiens
ggaggttaaartgaatctgta

SEQ ID NO: 10631 - DNA, 21 bp, Homo sapiens
actttacaccycatttgtttc

SEQ ID NO: 10632 - DNA, 21 bp, Homo sapiens
tattatgtacrtgtctacttc

SEQ ID NO: 10633 - DNA, 21 bp, Homo sapiens
aagagagaagyactgatggcc

SEQ ID NO: 10634 - DNA, 21 bp, Homo sapiens
gtatccctacrtatttcctat

SEQ ID NO: 10635 - DNA, 21 bp, Homo sapiens
ctgtaaactgwtacctgaaaa

SEQ ID NO: 10636 - DNA, 21 bp, Homo sapiens
gtgttccttgrcttgttgcat

SEQ ID NO: 10637 - DNA, 21 bp, Homo sapiens
acagtaaaatrctattaaatg

SEQ ID NO: 10638 - DNA, 21 bp, Homo sapiens
aaagcacgatygcacagttct

SEQ ID NO: 10639 - DNA, 21 bp, Homo sapiens
aacatggctcycattctccag

SEQ ID NO: 10640 - DNA, 21 bp, Homo sapiens
attaaacattycacccaggaa

SEQ ID NO: 10641 - DNA, 21 bp, Homo sapiens
tggcttaaacyctgcttttct

SEQ ID NO: 10642 - DNA, 21 bp, Homo sapiens
tattttttcakttgagtactt

SEQ ID NO: 10643 - DNA, 21 bp, Homo sapiens
ctgcacgtagytgcaaatata

SEQ ID NO: 10644 - DNA, 21 bp, Homo sapiens
ttttcgatctstttgtttcta

SEQ ID NO: 10645 - DNA, 21 bp, Homo sapiens
ttctttttctktggcctactg

SEQ ID NO: 10646 - DNA, 21 bp, Homo sapiens
acattcacatyatatacctag

SEQ ID NO: 10647 - DNA, 21 bp, Homo sapiens
cttttccgagrgacataatag

SEQ ID NO: 10648 - DNA, 21 bp, Homo sapiens
agaacattaayttccaaagca

SEQ ID NO: 10649 - DNA, 21 bp, Homo sapiens
tcagtctttcracccttaggg

SEQ ID NO: 10650 - DNA, 21 bp, Homo sapiens
tttaaaaaacmtaaatcctgc

SEQ ID NO: 10651 - DNA, 21 bp, Homo sapiens
aggccgtcttyttccctaagt

SEQ ID NO: 10652 - DNA, 21 bp, Homo sapiens
gtatactgatkccagccaagt

SEQ ID NO: 10653 - DNA, 21 bp, Homo sapiens
acagtatttamtgaacatcta

SEQ ID NO: 10654 - DNA, 21 bp, Homo sapiens
gtctctttttyagcttctgtg

SEQ ID NO: 10655 - DNA, 21 bp, Homo sapiens
aatcagaaaastgacctctgc

SEQ ID NO: 10656 - DNA, 21 bp, Homo sapiens
gtaaaaagtarcataggaaat

SEQ ID NO: 10657 - DNA, 21 bp, Homo sapiens
tgaacctatgrgcgaagaagg

SEQ ID NO: 10658 - DNA, 21 bp, Homo sapiens
gaaaaaatttmgttttgcgtt

SEQ ID NO: 10659 - DNA, 21 bp, Homo sapiens
catgacatttraaatcaccaa

SEQ ID NO: 10660 - DNA, 21 bp, Homo sapiens
gtgggattcascacgtttttg

SEQ ID NO: 10661 - DNA, 21 bp, Homo sapiens
tgatgtaagasaacagcccca

SEQ ID NO: 10662 - DNA, 21 bp, Homo sapiens
attgcattacsgtccaattag

SEQ ID NO: 10663 - DNA, 21 bp, Homo sapiens
tttcagagcaytttatctaaa

SEQ ID NO: 10664 - DNA, 21 bp, Homo sapiens
ctgacaagtgycttttttatt

SEQ ID NO: 10665 - DNA, 21 bp, Homo sapiens
actgtgaaatmtcagactaat

SEQ ID NO: 10666 - DNA, 21 bp, Homo sapiens
ccagatggctkcagggcacaa

SEQ ID NO: 10667 - DNA, 21 bp, Homo sapiens
acagggtggcsgagaggaaga

SEQ ID NO: 10668 - DNA, 21 bp, Homo sapiens
cttcaagcaayaggaaaagta

SEQ ID NO: 10669 - DNA, 21 bp, Homo sapiens
tccaggatgcyccgcccccac

SEQ ID NO: 10670 - DNA, 21 bp, Homo sapiens
ggctcactctygcgttcccac

SEQ ID NO: 10671 - DNA, 21 bp, Homo sapiens
cctcctctccstgaatttcct

SEQ ID NO: 10672 - DNA, 21 bp, Homo sapiens
tattgaatatyaaacaaaatc

SEQ ID NO: 10673 - DNA, 21 bp, Homo sapiens
ctcaaaatgcrctgtaatatt

SEQ ID NO: 10674 - DNA, 21 bp, Homo sapiens
cagaggtgggrggaaagcgag

SEQ ID NO: 10675 - DNA, 21 bp, Homo sapiens
ctcccgggtayccgtcccccc

SEQ ID NO: 10676 - DNA, 21 bp, Homo sapiens
gccagtctgcyggagcaaagc

SEQ ID NO: 10677 - DNA, 21 bp, Homo sapiens
ccttggaggcygaggtgggag

SEQ ID NO: 10678 - DNA, 21 bp, Homo sapiens
ctagaatccartacaaacatg

SEQ ID NO: 10679 - DNA, 21 bp, Homo sapiens
gaatcttcatrattaaataga

SEQ ID NO: 10680 - DNA, 21 bp, Homo sapiens
cagaagactgycctatgaaag

SEQ ID NO: 10681 - DNA, 21 bp, Homo sapiens
aagggaacagyagcaaggaca

SEQ ID NO: 10682 - DNA, 21 bp, Homo sapiens
attctgcaagwgtagaagtta

SEQ ID NO: 10683 - DNA, 21 bp, Homo sapiens
actcatcataytccatgtact

SEQ ID NO: 10684 - DNA, 21 bp, Homo sapiens
ctccaaggttrgcagcagcca

SEQ ID NO: 10685 - DNA, 21 bp, Homo sapiens
ctgtgaagtaktgagagaaca

SEQ ID NO: 10686 - DNA, 21 bp, Homo sapiens
aacagtgtgtrtctttgtcca

SEQ ID NO: 10687 - DNA, 21 bp, Homo sapiens
aaaataattgyagtttcaaaa

SEQ ID NO: 10688 - DNA, 21 bp, Homo sapiens
gctgctagttytccagacgct

SEQ ID NO: 10689 - DNA, 21 bp, Homo sapiens
atttggggaaragtgactatt

SEQ ID NO: 10690 - DNA, 21 bp, Homo sapiens
gtcaggtccarcatggcctca

SEQ ID NO: 10691 - DNA, 21 bp, Homo sapiens
cacatggaacytaagagcagg

SEQ ID NO: 10692 - DNA, 21 bp, Homo sapiens
caaatgactcyaggtgctgcc

SEQ ID NO: 10693 - DNA, 21 bp, Homo sapiens
accgtacataygattatagat

SEQ ID NO: 10694 - DNA, 21 bp, Homo sapiens
caatacaatgrcagcaaggtt

SEQ ID NO: 10695 - DNA, 21 bp, Homo sapiens
tctaaaaaaamcagattgatt

SEQ ID NO: 10696 - DNA, 21 bp, Homo sapiens
aagctccagasagtgatggga

SEQ ID NO: 10697 - DNA, 21 bp, Homo sapiens
ggagaaatgaragacaacagt

SEQ ID NO: 10698 - DNA, 21 bp, Homo sapiens
ctgaattttgsaatatctata

SEQ ID NO: 10699 - DNA, 21 bp, Homo sapiens
agagagacctytaaaatggct

SEQ ID NO: 10700 - DNA, 21 bp, Homo sapiens
aatcggttcayaaaatctctg

SEQ ID NO: 10701 - DNA, 21 bp, Homo sapiens
ttttgcagcayatctccctca

SEQ ID NO: 10702 - DNA, 21 bp, Homo sapiens
aacactcaggwctgattaaac

SEQ ID NO: 10703 - DNA, 21 bp, Homo sapiens
attcttggctrtcttaatatt

SEQ ID NO: 10704 - DNA, 21 bp, Homo sapiens
ggggcttgagrgagaccaatt

SEQ ID NO: 10705 - DNA, 21 bp, Homo sapiens
tagatgttgarctttgctgga

SEQ ID NO: 10706 - DNA, 21 bp, Homo sapiens
tgattaatttktttaagtgac

SEQ ID NO: 10707 - DNA, 21 bp, Homo sapiens
ctttattttcycttgtttacc

SEQ ID NO: 10708 - DNA, 21 bp, Homo sapiens
gaagagtctcrgtagaggaat

SEQ ID NO: 10709 - DNA, 21 bp, Homo sapiens
acaaaaactaytgaatacatc

SEQ ID NO: 10710 - DNA, 21 bp, Homo sapiens
ttcacataagratttcgcctt

SEQ ID NO: 10711 - DNA, 21 bp, Homo sapiens
ttgaatgtttwataaatgcta

SEQ ID NO: 10712 - DNA, 21 bp, Homo sapiens
agaatctgttkggtctatttc

SEQ ID NO: 10713 - DNA, 21 bp, Homo sapiens
tgaatcaatasttgttatgga

SEQ ID NO: 10714 - DNA, 21 bp, Homo sapiens
ttccagattcytgatttatgc

SEQ ID NO: 10715 - DNA, 21 bp, Homo sapiens
caaacaaccaytaaacttcag

SEQ ID NO: 10716 - DNA, 21 bp, Homo sapiens
tactaactcargaattaagcc

SEQ ID NO: 10717 - DNA, 21 bp, Homo sapiens
tttcatatgaycatgtcttct

SEQ ID NO: 10718 - DNA, 21 bp, Homo sapiens
tgtaaaagcaygtgtcattat

SEQ ID NO: 10719 - DNA, 21 bp, Homo sapiens
gtcagctttgytcctttgatg

SEQ ID NO: 10720 - DNA, 21 bp, Homo sapiens
tgtaataaaakcattttgttc

SEQ ID NO: 10721 - DNA, 21 bp, Homo sapiens
tgtatttggaytatttctccc

SEQ ID NO: 10722 - DNA, 21 bp, Homo sapiens
tcaaaaagtgycatagtcata

SEQ ID NO: 10723 - DNA, 21 bp, Homo sapiens
tatttttggcrtgataaactt

SEQ ID NO: 10724 - DNA, 21 bp, Homo sapiens
cacatacgttrgttctgtttc

SEQ ID NO: 10725 - DNA, 21 bp, Homo sapiens
tttttaagctragcaataatc

SEQ ID NO: 10726 - DNA, 21 bp, Homo sapiens
gcctttctgaygatttattgt

SEQ ID NO: 10727 - DNA, 21 bp, Homo sapiens
tactcattttwgcaataacta

SEQ ID NO: 10728 - DNA, 21 bp, Homo sapiens
ttgtttcagcstataatttgt

SEQ ID NO: 10729 - DNA, 21 bp, Homo sapiens
catattggtayacttcaagta

SEQ ID NO: 10730 - DNA, 21 bp, Homo sapiens
aataaaaggarcatatctcaa

SEQ ID NO: 10731 - DNA, 21 bp, Homo sapiens
ggctgctcatwcattattcct

SEQ ID NO: 10732 - DNA, 21 bp, Homo sapiens
aatctttgcaygttcaatatc

SEQ ID NO: 10733 - DNA, 21 bp, Homo sapiens
acattgtcacwcatacaagga

SEQ ID NO: 10734 - DNA, 21 bp, Homo sapiens
taaatggaatktattttaact

SEQ ID NO: 10735 - DNA, 21 bp, Homo sapiens
gctaggttaaytattcaattt

SEQ ID NO: 10736 - DNA, 21 bp, Homo sapiens
gaacaatcccrttaaaaagta

SEQ ID NO: 10737 - DNA, 21 bp, Homo sapiens
gagtttatcaycttctaggac

SEQ ID NO: 10738 - DNA, 21 bp, Homo sapiens
agaatatagcyagacaatgca

SEQ ID NO: 10739 - DNA, 21 bp, Homo sapiens
ggaacatttakatttcagttt

SEQ ID NO: 10740 - DNA, 21 bp, Homo sapiens
atgtcatatgyacacaggaga

SEQ ID NO: 10741 - DNA, 21 bp, Homo sapiens
caccaaaattraattatgcta

SEQ ID NO: 10742 - DNA, 21 bp, Homo sapiens
ccaccagtaayaccgaagaat

SEQ ID NO: 10743 - DNA, 21 bp, Homo sapiens
acctgataatwcatttcagtg

SEQ ID NO: 10744 - DNA, 21 bp, Homo sapiens
taattgtggayatgcaaagag

SEQ ID NO: 10745 - DNA, 21 bp, Homo sapiens
caggcaaaagraattttttta

SEQ ID NO: 10746 - DNA, 21 bp, Homo sapiens
ggttttttgasacatatttaa

SEQ ID NO: 10747 - DNA, 21 bp, Homo sapiens
acatactgaartagaagttaa

SEQ ID NO: 10748 - DNA, 21 bp, Homo sapiens
agtaaaattaytttcttgccc

SEQ ID NO: 10749 - DNA, 21 bp, Homo sapiens
attttggatgrtggaccacaa

SEQ ID NO: 10750 - DNA, 21 bp, Homo sapiens
ggcttttaaasagtttatgtc

SEQ ID NO: 10751 - DNA, 21 bp, Homo sapiens
taagtgttcawttagagttca

SEQ ID NO: 10752 - DNA, 21 bp, Homo sapiens
tcttcagctcracaggtctca

SEQ ID NO: 10753 - DNA, 21 bp, Homo sapiens
atgatgaatcratgaacaaat

SEQ ID NO: 10754 - DNA, 21 bp, Homo sapiens
cgaaagtccarttaaggatta

SEQ ID NO: 10755 - DNA, 21 bp, Homo sapiens
ctctcacctgyttgattctca

SEQ ID NO: 10756 - DNA, 21 bp, Homo sapiens
gaggctttacrtgtttgacat

SEQ ID NO: 10757 - DNA, 21 bp, Homo sapiens
tacacagatgwctagaaaaga

SEQ ID NO: 10758 - DNA, 21 bp, Homo sapiens
tggttcacgcytctgggatca

SEQ ID NO: 10759 - DNA, 21 bp, Homo sapiens
aattcaatttytaagcctatt

SEQ ID NO: 10760 - DNA, 21 bp, Homo sapiens
aggattttgakatacagtcat

SEQ ID NO: 10761 - DNA, 21 bp, Homo sapiens
ggaagcatttsctagtggttt

SEQ ID NO: 10762 - DNA, 21 bp, Homo sapiens
ttccaggagcrcaaaaaatcc

SEQ ID NO: 10763 - DNA, 21 bp, Homo sapiens
gcgattagaaygttaactcca

SEQ ID NO: 10764 - DNA, 21 bp, Homo sapiens
cttgggctacrtcttgacttt

SEQ ID NO: 10765 - DNA, 21 bp, Homo sapiens
acagaactgtsggtttgtgag

SEQ ID NO: 10766 - DNA, 21 bp, Homo sapiens
gtgttcagagyacaagagggc

SEQ ID NO: 10767 - DNA, 21 bp, Homo sapiens
caaaataaaawcttccatctc

SEQ ID NO: 10768 - DNA, 21 bp, Homo sapiens
tggtctaggamtctatctacc

SEQ ID NO: 10769 - DNA, 21 bp, Homo sapiens
cgggcagcaaygactggtttg

SEQ ID NO: 10770 - DNA, 21 bp, Homo sapiens
tgtctgtagawggttcactct

SEQ ID NO: 10771 - DNA, 21 bp, Homo sapiens
aggccaaggtygaaaggcaga

SEQ ID NO: 10772 - DNA, 21 bp, Homo sapiens
gcatgggtgaygggtaatcat

SEQ ID NO: 10773 - DNA, 21 bp, Homo sapiens
cccagggattkgtcaccagtc

SEQ ID NO: 10774 - DNA, 21 bp, Homo sapiens
aaaattagttktatctaacct

SEQ ID NO: 10775 - DNA, 21 bp, Homo sapiens
cttttggtttyctcaaatcat

SEQ ID NO: 10776 - DNA, 21 bp, Homo sapiens
ttgaagagtaygtgcccttta

SEQ ID NO: 10777 - DNA, 21 bp, Homo sapiens
tcaagttaacrtacagcatta

SEQ ID NO: 10778 - DNA, 21 bp, Homo sapiens
atgatggtttwggtttacaat

SEQ ID NO: 10779 - DNA, 21 bp, Homo sapiens
tgacccacaayggcatgatct

SEQ ID NO: 10780 - DNA, 21 bp, Homo sapiens
acctgaggggkttttgaagtg

SEQ ID NO: 10781 - DNA, 21 bp, Homo sapiens
caaccagtagrcctggaactt

SEQ ID NO: 10782 - DNA, 21 bp, Homo sapiens
tgatctgcagmgctccaacag

SEQ ID NO: 10783 - DNA, 21 bp, Homo sapiens
gtagatactckgcacaaatat

SEQ ID NO: 10784 - DNA, 21 bp, Homo sapiens
tagggagcctkgccaatggga

SEQ ID NO: 10785 - DNA, 21 bp, Homo sapiens
aaatattcagygtccctttag

SEQ ID NO: 10786 - DNA, 21 bp, Homo sapiens
atacaaaatayttagcacata

SEQ ID NO: 10787 - DNA, 21 bp, Homo sapiens
attctgctctsctcttcccat

SEQ ID NO: 10788 - DNA, 21 bp, Homo sapiens
tctgcagtcawttcttcacca

SEQ ID NO: 10789 - DNA, 21 bp, Homo sapiens
gacaaaaataycaactgtatc

SEQ ID NO: 10790 - DNA, 21 bp, Homo sapiens
agaggtgttamtgtccacaat

SEQ ID NO: 10791 - DNA, 21 bp, Homo sapiens
tctcgaagggsctacatgcta

SEQ ID NO: 10792 - DNA, 21 bp, Homo sapiens
ttatccataaygctcctggta

SEQ ID NO: 10793 - DNA, 21 bp, Homo sapiens
tcttactgcaytggggttata

SEQ ID NO: 10794 - DNA, 21 bp, Homo sapiens
cactgaggtgkacatgccaat

SEQ ID NO: 10795 - DNA, 21 bp, Homo sapiens
taaaacgctawctttaatgat

SEQ ID NO: 10796 - DNA, 21 bp, Homo sapiens
tgctaaactaraaacgcgaaa

SEQ ID NO: 10797 - DNA, 21 bp, Homo sapiens
ggtgttccaargcttctggca

SEQ ID NO: 10798 - DNA, 21 bp, Homo sapiens
ttctttctcamatttctcaac

SEQ ID NO: 10799 - DNA, 21 bp, Homo sapiens
aaacacttgtsgaatgaatag

SEQ ID NO: 10800 - DNA, 21 bp, Homo sapiens
atgtaaaaaayagccctgatc

SEQ ID NO: 10801 - DNA, 21 bp, Homo sapiens
acacctggggytttaaaaagc

SEQ ID NO: 10802 - DNA, 21 bp, Homo sapiens
aggcgatcttmaacatcactt

SEQ ID NO: 10803 - DNA, 21 bp, Homo sapiens
ccatcactgamagctatagag

SEQ ID NO: 10804 - DNA, 21 bp, Homo sapiens
ttgcccactcygctctttctc

SEQ ID NO: 10805 - DNA, 21 bp, Homo sapiens
gggaaaaggtytgtttcatta

SEQ ID NO: 10806 - DNA, 21 bp, Homo sapiens
aagaaaatatrccatagaatg

SEQ ID NO: 10807 - DNA, 21 bp, Homo sapiens
tgtgttctctrtactgggagg

SEQ ID NO: 10808 - DNA, 21 bp, Homo sapiens
tctttcttgakctgcacaatc

SEQ ID NO: 10809 - DNA, 21 bp, Homo sapiens
tttcaaaatcracatcatgat

SEQ ID NO: 10810 - DNA, 21 bp, Homo sapiens
gaaaccttatwcacattggag

SEQ ID NO: 10811 - DNA, 21 bp, Homo sapiens
gtaagcatgtragttgtgatc

SEQ ID NO: 10812 - DNA, 21 bp, Homo sapiens
gatcaactcgygtggtgagtt

SEQ ID NO: 10813 - DNA, 21 bp, Homo sapiens
aggttgatctrtgagaaactt

SEQ ID NO: 10814 - DNA, 21 bp, Homo sapiens
tctcttgtaawtttattccat

SEQ ID NO: 10815 - DNA, 21 bp, Homo sapiens
gaggtggtacycaatttttga

SEQ ID NO: 10816 - DNA, 21 bp, Homo sapiens
atacttgatgyctttccatga

SEQ ID NO: 10817 - DNA, 21 bp, Homo sapiens
aattttttctygttcaataca

SEQ ID NO: 10818 - DNA, 21 bp, Homo sapiens
catcacccttsttatcccatg

SEQ ID NO: 10819 - DNA, 21 bp, Homo sapiens
cctacacaaaktttttatttg

SEQ ID NO: 10820 - DNA, 21 bp, Homo sapiens
gcatcaactgygtaaactaaa

SEQ ID NO: 10821 - DNA, 21 bp, Homo sapiens
caggggacaayaagaagactt

SEQ ID NO: 10822 - DNA, 21 bp, Homo sapiens
ttttgtgaggkttagggaaga

SEQ ID NO: 10823 - DNA, 21 bp, Homo sapiens
attagaatgayaggttctgga

SEQ ID NO: 10824 - DNA, 21 bp, Homo sapiens
ctctctttctrgttaagccct

SEQ ID NO: 10825 - DNA, 21 bp, Homo sapiens
ctttcattcaytgtttgctga

SEQ ID NO: 10826 - DNA, 21 bp, Homo sapiens
agcaactcttkctctcaataa

SEQ ID NO: 10827 - DNA, 21 bp, Homo sapiens
aatctccaaartaagtacagt

SEQ ID NO: 10828 - DNA, 21 bp, Homo sapiens
cacagttgtcrtaatgctaag

SEQ ID NO: 10829 - DNA, 21 bp, Homo sapiens
gcataggaaastactctgcct

SEQ ID NO: 10830 - DNA, 21 bp, Homo sapiens
caaggccattrtagttaaatc

SEQ ID NO: 10831 - DNA, 21 bp, Homo sapiens
acattttcccrtggttttacc

SEQ ID NO: 10832 - DNA, 21 bp, Homo sapiens
aacacagatgmagttttacag

SEQ ID NO: 10833 - DNA, 21 bp, Homo sapiens
gacttgtactycatctcaaat

SEQ ID NO: 10834 - DNA, 21 bp, Homo sapiens
ttcaattctcmttctgagcaa

SEQ ID NO: 10835 - DNA, 21 bp, Homo sapiens
ggaggagaacrgaatatcaaa

SEQ ID NO: 10836 - DNA, 21 bp, Homo sapiens
atcatataacygagataagtc

SEQ ID NO: 10837 - DNA, 21 bp, Homo sapiens
gcaaagtctgmcaccaggtgc

SEQ ID NO: 10838 - DNA, 21 bp, Homo sapiens
attgtccatcyaaattgaagc

SEQ ID NO: 10839 - DNA, 21 bp, Homo sapiens
aaatataagaygcaaattgta

SEQ ID NO: 10840 - DNA, 21 bp, Homo sapiens
accactgtaawtcttttctta

SEQ ID NO: 10841 - DNA, 21 bp, Homo sapiens
agtataattgktaagtgaggg

SEQ ID NO: 10842 - DNA, 21 bp, Homo sapiens
cctaaatgggmgatattctat

SEQ ID NO: 10843 - DNA, 21 bp, Homo sapiens
cctatttcccmactcagatca

SEQ ID NO: 10844 - DNA, 21 bp, Homo sapiens
aaaaccttcartagattaaaa

SEQ ID NO: 10845 - DNA, 21 bp, Homo sapiens
cattaccaagrtccaccaaaa

SEQ ID NO: 10846 - DNA, 21 bp, Homo sapiens
attgcttggargacaaaagtt

SEQ ID NO: 10847 - DNA, 21 bp, Homo sapiens
agattatttcygaggttactt

SEQ ID NO: 10848 - DNA, 21 bp, Homo sapiens
tgttcctttartactcagaca

SEQ ID NO: 10849 - DNA, 21 bp, Homo sapiens
catcctgaagrcttccacatt

SEQ ID NO: 10850 - DNA, 21 bp, Homo sapiens
aggacacatgsacacaaaaaa

SEQ ID NO: 10851 - DNA, 21 bp, Homo sapiens
gcacccacacyagaaaagcca

SEQ ID NO: 10852 - DNA, 21 bp, Homo sapiens
agagcgtttgmgttgagagca

SEQ ID NO: 10853 - DNA, 21 bp, Homo sapiens
acttcattgtmttgaaaaaat

SEQ ID NO: 10854 - DNA, 21 bp, Homo sapiens
agatcagcagsaacaaggggt

SEQ ID NO: 10855 - DNA, 21 bp, Homo sapiens
accttgccaamactttcaaag

SEQ ID NO: 10856 - DNA, 21 bp, Homo sapiens
caggttggatkttgtcttttt

SEQ ID NO: 10857 - DNA, 21 bp, Homo sapiens
actcagaaggsattttggttc

SEQ ID NO: 10858 - DNA, 21 bp, Homo sapiens
gttgaacctaygtaagcagct

SEQ ID NO: 10859 - DNA, 21 bp, Homo sapiens
aaactcttaarccaaacttgg

SEQ ID NO: 10860 - DNA, 21 bp, Homo sapiens
ctgttaaaaayaaacttactt

SEQ ID NO: 10861 - DNA, 21 bp, Homo sapiens
ccacagagacytccagaagag

SEQ ID NO: 10862 - DNA, 21 bp, Homo sapiens
gtgtgctttcrtctgactccg

SEQ ID NO: 10863 - DNA, 21 bp, Homo sapiens
aggggatcccrggaagggtga

SEQ ID NO: 10864 - DNA, 21 bp, Homo sapiens
aaagcacaaarcaatttcagc

SEQ ID NO: 10865 - DNA, 21 bp, Homo sapiens
gtctcttcggycttggccctc

SEQ ID NO: 10866 - DNA, 21 bp, Homo sapiens
aaatcagatcrtttcatttca

SEQ ID NO: 10867 - DNA, 21 bp, Homo sapiens
ttggaggaaayctgcctgtaa

SEQ ID NO: 10868 - DNA, 21 bp, Homo sapiens
ccacacagccrtgatgcctca

SEQ ID NO: 10869 - DNA, 21 bp, Homo sapiens
tccataatatrcttttagaaa

SEQ ID NO: 10870 - DNA, 21 bp, Homo sapiens
ggtgagtcagygactgtctaa

SEQ ID NO: 10871 - DNA, 21 bp, Homo sapiens
gaagtaaggargccagtgata

SEQ ID NO: 10872 - DNA, 21 bp, Homo sapiens
gaaggatcttmatgaatggtg

SEQ ID NO: 10873 - DNA, 21 bp, Homo sapiens
tgctagaaacygagccatttt

SEQ ID NO: 10874 - DNA, 21 bp, Homo sapiens
tggcaagcacmcggccttgtt

SEQ ID NO: 10875 - DNA, 21 bp, Homo sapiens
cagacccagcmcagtaaaaat

SEQ ID NO: 10876 - DNA, 21 bp, Homo sapiens
tagtggatttycaagtgatgg

SEQ ID NO: 10877 - DNA, 21 bp, Homo sapiens
ccaaacctcarattctcattt

SEQ ID NO: 10878 - DNA, 21 bp, Homo sapiens
ctatattttartacaatcatc

SEQ ID NO: 10879 - DNA, 21 bp, Homo sapiens
ctgcaattatytcacctatct

SEQ ID NO: 10880 - DNA, 21 bp, Homo sapiens
ctgaaagtctktggataatgg

SEQ ID NO: 10881 - DNA, 21 bp, Homo sapiens
aaattgctgcstaacatgccg

SEQ ID NO: 10882 - DNA, 21 bp, Homo sapiens
gtatgatcggmtaaacctctc

SEQ ID NO: 10883 - DNA, 21 bp, Homo sapiens
tggtcagtgawcccatttcct

SEQ ID NO: 10884 - DNA, 21 bp, Homo sapiens
cttagcttccygtcgttcaaa

SEQ ID NO: 10885 - DNA, 21 bp, Homo sapiens
tatcagattckctttttataa

SEQ ID NO: 10886 - DNA, 21 bp, Homo sapiens
ttaacttaacyactggcataa

SEQ ID NO: 10887 - DNA, 21 bp, Homo sapiens
tttatgtcctraagacccata

SEQ ID NO: 10888 - DNA, 21 bp, Homo sapiens
tgtaatagagrtgatataaaa

SEQ ID NO: 10889 - DNA, 21 bp, Homo sapiens
ctatgtcttcycatctatatt

SEQ ID NO: 10890 - DNA, 21 bp, Homo sapiens
atatagagctsacgtgcttca

SEQ ID NO: 10891 - DNA, 21 bp, Homo sapiens
atacagcctamatctttctaa

SEQ ID NO: 10892 - DNA, 21 bp, Homo sapiens
tcagataaagyggtaagacct

SEQ ID NO: 10893 - DNA, 21 bp, Homo sapiens
tttccgagaayagagttcata

SEQ ID NO: 10894 - DNA, 21 bp, Homo sapiens
ggttcaaggtmctcttctata

SEQ ID NO: 10895 - DNA, 21 bp, Homo sapiens
gcaaatgtatrtagatttctg

SEQ ID NO: 10896 - DNA, 21 bp, Homo sapiens
acaaataaatwtggccaatga

SEQ ID NO: 10897 - DNA, 21 bp, Homo sapiens
ctatgctcackgttttttcag

SEQ ID NO: 10898 - DNA, 21 bp, Homo sapiens
aactaagcgargcacagccca

SEQ ID NO: 10899 - DNA, 21 bp, Homo sapiens
tcaagtggagyatcagtgcaa

SEQ ID NO: 10900 - DNA, 21 bp, Homo sapiens
attccagtgaygggagaatct

SEQ ID NO: 10901 - DNA, 21 bp, Homo sapiens
atattttctcwtgatgaattc

SEQ ID NO: 10902 - DNA, 21 bp, Homo sapiens
ctcctagaggwtttttctcaa

SEQ ID NO: 10903 - DNA, 21 bp, Homo sapiens
taaaatgtcawggaattaaag

SEQ ID NO: 10904 - DNA, 21 bp, Homo sapiens
aaatgctaacyacctggaaaa

SEQ ID NO: 10905 - DNA, 21 bp, Homo sapiens
cctttttatcytcacagaact

SEQ ID NO: 10906 - DNA, 21 bp, Homo sapiens
tgttcttgtgmaattaccatg

SEQ ID NO: 10907 - DNA, 21 bp, Homo sapiens
agataacttgrcacatagtgg

SEQ ID NO: 10908 - DNA, 21 bp, Homo sapiens
gtctacagagwtaccatacac

SEQ ID NO: 10909 - DNA, 21 bp, Homo sapiens
ctcagctaaaratttcttcta

SEQ ID NO: 10910 - DNA, 21 bp, Homo sapiens
tatatccaaawggttaaatat

SEQ ID NO: 10911 - DNA, 21 bp, Homo sapiens
tgagctcctaygtgctgagca

SEQ ID NO: 10912 - DNA, 21 bp, Homo sapiens
atctcaactaraaactaaatg

SEQ ID NO: 10913 - DNA, 21 bp, Homo sapiens
ccatctgctcrgttatgagtg

SEQ ID NO: 10914 - DNA, 21 bp, Homo sapiens
ctagtctcttytatgccccca

SEQ ID NO: 10915 - DNA, 21 bp, Homo sapiens
attgccaatgyagaatcattt

SEQ ID NO: 10916 - DNA, 21 bp, Homo sapiens
gaaaaaaattratttccttac

SEQ ID NO: 10917 - DNA, 21 bp, Homo sapiens
cattagctccktgaagcattt

SEQ ID NO: 10918 - DNA, 21 bp, Homo sapiens
acaagctgctktcttagccta

SEQ ID NO: 10919 - DNA, 21 bp, Homo sapiens
ttatgttacasagttcaaaga

SEQ ID NO: 10920 - DNA, 21 bp, Homo sapiens
tcttattacartttttatgtc

SEQ ID NO: 10921 - DNA, 21 bp, Homo sapiens
ctttcaattcrttacttagat

SEQ ID NO: 10922 - DNA, 21 bp, Homo sapiens
gtgttggcaayagtttagtca

SEQ ID NO: 10923 - DNA, 21 bp, Homo sapiens
cttcagaaatyagctgggact

SEQ ID NO: 10924 - DNA, 21 bp, Homo sapiens
gacatttgttkcaatgtcact

SEQ ID NO: 10925 - DNA, 21 bp, Homo sapiens
catgagacatrtgactcaaca

SEQ ID NO: 10926 - DNA, 21 bp, Homo sapiens
ctagagaaaasttcatgttta

SEQ ID NO: 10927 - DNA, 21 bp, Homo sapiens
acaacagaacktggggatgag

SEQ ID NO: 10928 - DNA, 21 bp, Homo sapiens
gtcataacatytatacctatc

SEQ ID NO: 10929 - DNA, 21 bp, Homo sapiens
gcttttgatckggcttctctc

SEQ ID NO: 10930 - DNA, 21 bp, Homo sapiens
cccttgacaaygacattctaa

SEQ ID NO: 10931 - DNA, 21 bp, Homo sapiens
tggtgagtaaygaatggctgc

SEQ ID NO: 10932 - DNA, 21 bp, Homo sapiens
cttacttgccygaagacattt

SEQ ID NO: 10933 - DNA, 21 bp, Homo sapiens
attgtccttcrgtcttacctg

SEQ ID NO: 10934 - DNA, 21 bp, Homo sapiens
gacttgcccargttgacacca

SEQ ID NO: 10935 - DNA, 21 bp, Homo sapiens
tacacactatsaattagcagc

SEQ ID NO: 10936 - DNA, 21 bp, Homo sapiens
acagaagccayaggttaaagc

SEQ ID NO: 10937 - DNA, 21 bp, Homo sapiens
aactacttctrtgaatttacc

SEQ ID NO: 10938 - DNA, 21 bp, Homo sapiens
agaagtctacrgctcaaagaa

SEQ ID NO: 10939 - DNA, 21 bp, Homo sapiens
atataacttcyctgatgtgat

SEQ ID NO: 10940 - DNA, 21 bp, Homo sapiens
gataatacacrtggtggcaca

SEQ ID NO: 10941 - DNA, 21 bp, Homo sapiens
caaagatgtgrgatgttagta

SEQ ID NO: 10942 - DNA, 21 bp, Homo sapiens
ctccattattrtatagtaact

SEQ ID NO: 10943 - DNA, 21 bp, Homo sapiens
tctcccattcrctcttttctt

SEQ ID NO: 10944 - DNA, 21 bp, Homo sapiens
aatttggaacytatgagtagt

SEQ ID NO: 10945 - DNA, 21 bp, Homo sapiens
tctgtatcttstatcttgtgg

SEQ ID NO: 10946 - DNA, 21 bp, Homo sapiens
cacagtttatytaatccttat

SEQ ID NO: 10947 - DNA, 21 bp, Homo sapiens
gcagatttacyacctattagt

SEQ ID NO: 10948 - DNA, 21 bp, Homo sapiens
aacggtgggtkattaaatctg

SEQ ID NO: 10949 - DNA, 21 bp, Homo sapiens
ataatcttatrccggagcaaa

SEQ ID NO: 10950 - DNA, 21 bp, Homo sapiens
tgcagcaggakactcctgtgg

SEQ ID NO: 10951 - DNA, 21 bp, Homo sapiens
gttctcctacmtagtttctct

SEQ ID NO: 10952 - DNA, 21 bp, Homo sapiens
tttaaaaatgyaatatctgca

SEQ ID NO: 10953 - DNA, 21 bp, Homo sapiens
aaaagataaamgagtaggtaa

SEQ ID NO: 10954 - DNA, 21 bp, Homo sapiens
ctaatactcaygatcacatga

SEQ ID NO: 10955 - DNA, 21 bp, Homo sapiens
taattatcacrggcatgaaac

SEQ ID NO: 10956 - DNA, 21 bp, Homo sapiens
gcaagggcctkacttagcaca

SEQ ID NO: 10957 - DNA, 21 bp, Homo sapiens
taggtttgtgkaccaggtctt

SEQ ID NO: 10958 - DNA, 21 bp, Homo sapiens
aggctctgacytcaaatattc

SEQ ID NO: 10959 - DNA, 21 bp, Homo sapiens
tccatgttgcraaagcattca

SEQ ID NO: 10960 - DNA, 21 bp, Homo sapiens
tactcataccrtttccttctt

SEQ ID NO: 10961 - DNA, 21 bp, Homo sapiens
tacaaatgctrtgtctaaatt

SEQ ID NO: 10962 - DNA, 21 bp, Homo sapiens
tgtataatcaygtgttcctgc

SEQ ID NO: 10963 - DNA, 21 bp, Homo sapiens
agctgattatkagctagcaga

SEQ ID NO: 10964 - DNA, 21 bp, Homo sapiens
taaaatgatgkctcattgatg

SEQ ID NO: 10965 - DNA, 21 bp, Homo sapiens
taccccaagtktggtttcaga

SEQ ID NO: 10966 - DNA, 21 bp, Homo sapiens
attgctgatcytcacagttaa

SEQ ID NO: 10967 - DNA, 21 bp, Homo sapiens
gtattgagtayttcattgttc

SEQ ID NO: 10968 - DNA, 21 bp, Homo sapiens
acatatatccrtgtggccagt

SEQ ID NO: 10969 - DNA, 21 bp, Homo sapiens
cacatgcattmttccttggga

SEQ ID NO: 10970 - DNA, 21 bp, Homo sapiens
ggcggagatgmtactaaattg

SEQ ID NO: 10971 - DNA, 21 bp, Homo sapiens
cggatttgagwtgaaaatgtc

SEQ ID NO: 10972 - DNA, 21 bp, Homo sapiens
tggcaatcttwtgaagaaaca

SEQ ID NO: 10973 - DNA, 21 bp, Homo sapiens
tgtgatgaagkaatgaaactc

SEQ ID NO: 10974 - DNA, 21 bp, Homo sapiens
acggttgcctwttttccatat

SEQ ID NO: 10975 - DNA, 21 bp, Homo sapiens
taaagccatargagaaactta

SEQ ID NO: 10976 - DNA, 21 bp, Homo sapiens
tcctcatgaaytggcattctt

SEQ ID NO: 10977 - DNA, 21 bp, Homo sapiens
gtcacatgggrcccagggcgc

SEQ ID NO: 10978 - DNA, 21 bp, Homo sapiens
aaagtttcccrtgaacttgaa

SEQ ID NO: 10979 - DNA, 21 bp, Homo sapiens
cgtgttccccstcgagatggc

SEQ ID NO: 10980 - DNA, 21 bp, Homo sapiens
ttcgttctaartgcacatgag

SEQ ID NO: 10981 - DNA, 21 bp, Homo sapiens
gtttctcaagraagttataga

SEQ ID NO: 10982 - DNA, 21 bp, Homo sapiens
aatttgcacasttactacaat

SEQ ID NO: 10983 - DNA, 21 bp, Homo sapiens
agtatattttrcaggctcttg

SEQ ID NO: 10984 - DNA, 21 bp, Homo sapiens
atgtgtccctrttagataatt

SEQ ID NO: 10985 - DNA, 21 bp, Homo sapiens
atatactcaayaggcactggc

SEQ ID NO: 10986 - DNA, 21 bp, Homo sapiens
aaacaaacatyggtgtccatt

SEQ ID NO: 10987 - DNA, 21 bp, Homo sapiens
ctaaaacctamtacataaagt

SEQ ID NO: 10988 - DNA, 21 bp, Homo sapiens
tggccatgaaytaaaaatctt

SEQ ID NO: 10989 - DNA, 21 bp, Homo sapiens
gaacttcaagmcactgcacct

SEQ ID NO: 10990 - DNA, 21 bp, Homo sapiens
gtcagccataygcgacacaag

SEQ ID NO: 10991 - DNA, 21 bp, Homo sapiens
ccattaaaccrtcattttagt

SEQ ID NO: 10992 - DNA, 21 bp, Homo sapiens
acaacatgggyggggacaaat

SEQ ID NO: 10993 - DNA, 21 bp, Homo sapiens
ataagatggaraagaaaaggg

SEQ ID NO: 10994 - DNA, 21 bp, Homo sapiens
gcctcatacarcctgtggaac

SEQ ID NO: 10995 - DNA, 21 bp, Homo sapiens
ttgcgtttaaytttcctccgt

SEQ ID NO: 10996 - DNA, 21 bp, Homo sapiens
atataatccaragatgagagt

SEQ ID NO: 10997 - DNA, 21 bp, Homo sapiens
aagagcatctrgagagagtga

SEQ ID NO: 10998 - DNA, 21 bp, Homo sapiens
tatttagggasttgtcacatt

SEQ ID NO: 10999 - DNA, 21 bp, Homo sapiens
agtatgatctrgtactccttt

SEQ ID NO: 11000 - DNA, 21 bp, Homo sapiens
aagctctaatyaattgactta

SEQ ID NO: 11001 - DNA, 21 bp, Homo sapiens
gtcaacactgraggaagaaaa

SEQ ID NO: 11002 - DNA, 21 bp, Homo sapiens
tgagcatataytatatgctca

SEQ ID NO: 11003 - DNA, 21 bp, Homo sapiens
tgctttcacayactctagtgt

SEQ ID NO: 11004 - DNA, 21 bp, Homo sapiens
tgaacagagcyggtctaatac

SEQ ID NO: 11005 - DNA, 21 bp, Homo sapiens
acccataagcrattcaattta

SEQ ID NO: 11006 - DNA, 21 bp, Homo sapiens
gtggatagcaktatcatagtg

SEQ ID NO: 11007 - DNA, 21 bp, Homo sapiens
tgttttatcaytatgggcata

SEQ ID NO: 11008 - DNA, 21 bp, Homo sapiens
agttccttccratgtcaaagg

SEQ ID NO: 11009 - DNA, 21 bp, Homo sapiens
gtgaggactaygtgcacttca

SEQ ID NO: 11010 - DNA, 21 bp, Homo sapiens
accatcataayttgacactga

SEQ ID NO: 11011 - DNA, 21 bp, Homo sapiens
atcacttcacrtctgactgtt

SEQ ID NO: 11012 - DNA, 21 bp, Homo sapiens
actcaagtagmtttttagcaa

SEQ ID NO: 11013 - DNA, 21 bp, Homo sapiens
tgttataaaaytctgcttttt

SEQ ID NO: 11014 - DNA, 21 bp, Homo sapiens
gtaaaccactrggacatttgg

SEQ ID NO: 11015 - DNA, 21 bp, Homo sapiens
gatattccaayaccagccatt

SEQ ID NO: 11016 - DNA, 21 bp, Homo sapiens
attggaaaaamaactgaatac

SEQ ID NO: 11017 - DNA, 21 bp, Homo sapiens
ggataattccratgggagtcc

SEQ ID NO: 11018 - DNA, 21 bp, Homo sapiens
ctacacaagayacataaatga

SEQ ID NO: 11019 - DNA, 21 bp, Homo sapiens
cggatgtacayactatatact

SEQ ID NO: 11020 - DNA, 21 bp, Homo sapiens
ggtttgccacygacagatgac

SEQ ID NO: 11021 - DNA, 21 bp, Homo sapiens
aataacagacyaaggagagta

SEQ ID NO: 11022 - DNA, 21 bp, Homo sapiens
tcctcccaccraaggccacag

SEQ ID NO: 11023 - DNA, 21 bp, Homo sapiens
taacaacaaaygtccagctac

SEQ ID NO: 11024 - DNA, 21 bp, Homo sapiens
gatgagaaaaygcaggattag

SEQ ID NO: 11025 - DNA, 21 bp, Homo sapiens
actgaaattayttggtttcac

SEQ ID NO: 11026 - DNA, 21 bp, Homo sapiens
tggaattttcwaactgaagtg

SEQ ID NO: 11027 - DNA, 21 bp, Homo sapiens
caacccaaaayaaaagctatc

SEQ ID NO: 11028 - DNA, 21 bp, Homo sapiens
gaggctttaasttgactctaa

SEQ ID NO: 11029 - DNA, 21 bp, Homo sapiens
ccttgcactgkattaaatata

SEQ ID NO: 11030 - DNA, 21 bp, Homo sapiens
aataaaagggrcatctctcac

SEQ ID NO: 11031 - DNA, 21 bp, Homo sapiens
gtttggatgcytctatctgta

SEQ ID NO: 11032 - DNA, 21 bp, Homo sapiens
tggttacaatmcagaccctca

SEQ ID NO: 11033 - DNA, 21 bp, Homo sapiens
tagccttactygtacaatttt

SEQ ID NO: 11034 - DNA, 21 bp, Homo sapiens
acgccaggggyggtacaccag

SEQ ID NO: 11035 - DNA, 21 bp, Homo sapiens
tcttcgagtarattctgacac

SEQ ID NO: 11036 - DNA, 21 bp, Homo sapiens
ctttattcatrtacatttcct

SEQ ID NO: 11037 - DNA, 21 bp, Homo sapiens
tacaccagctrtagatttctt

SEQ ID NO: 11038 - DNA, 21 bp, Homo sapiens
ttatttctgargacaaaagca

SEQ ID NO: 11039 - DNA, 21 bp, Homo sapiens
cactagttctyatgccatttc

SEQ ID NO: 11040 - DNA, 21 bp, Homo sapiens
gctttaatttyctaaaagtct

SEQ ID NO: 11041 - DNA, 21 bp, Homo sapiens
tgggacataarccctggggaa

SEQ ID NO: 11042 - DNA, 21 bp, Homo sapiens
ttcaatcatgycttttttctg

SEQ ID NO: 11043 - DNA, 21 bp, Homo sapiens
agcaggaattmtttgttccac

SEQ ID NO: 11044 - DNA, 21 bp, Homo sapiens
tctaaaccaasaaattacaga

SEQ ID NO: 11045 - DNA, 21 bp, Homo sapiens
ccagtgtttcycccattttac

SEQ ID NO: 11046 - DNA, 21 bp, Homo sapiens
gcttttcagartggcgttttc

SEQ ID NO: 11047 - DNA, 21 bp, Homo sapiens
atagttaaaartctcccagag

SEQ ID NO: 11048 - DNA, 21 bp, Homo sapiens
atgttgctgcycttttgtttt

SEQ ID NO: 11049 - DNA, 21 bp, Homo sapiens
tagagaaatcygattttggag

SEQ ID NO: 11050 - DNA, 21 bp, Homo sapiens
tctaacattgrgattctttgt

SEQ ID NO: 11051 - DNA, 21 bp, Homo sapiens
catatgaaaaytagaataatc

SEQ ID NO: 11052 - DNA, 21 bp, Homo sapiens
acagcaagagsgaaaataatt

SEQ ID NO: 11053 - DNA, 21 bp, Homo sapiens
taatttcctgytttaactgag

SEQ ID NO: 11054 - DNA, 21 bp, Homo sapiens
aagacagtackcataagtgcc

SEQ ID NO: 11055 - DNA, 21 bp, Homo sapiens
ttgtatactcrctgaggtgac

SEQ ID NO: 11056 - DNA, 21 bp, Homo sapiens
ggataggccaytaaatttcag

SEQ ID NO: 11057 - DNA, 21 bp, Homo sapiens
gtgagagtccrgagaattttg

SEQ ID NO: 11058 - DNA, 21 bp, Homo sapiens
tagtgacgggytaattaacat

SEQ ID NO: 11059 - DNA, 21 bp, Homo sapiens
aatatataggrgctcacatca

SEQ ID NO: 11060 - DNA, 21 bp, Homo sapiens
ttaagtgaaarggtgatacac

SEQ ID NO: 11061 - DNA, 21 bp, Homo sapiens
tttttccctcrtggatgcctt

SEQ ID NO: 11062 - DNA, 21 bp, Homo sapiens
gagcaccagaytcagggatag

SEQ ID NO: 11063 - DNA, 21 bp, Homo sapiens
aagctctaggraagaatccta

SEQ ID NO: 11064 - DNA, 21 bp, Homo sapiens
ctacagattaracatggcttc

SEQ ID NO: 11065 - DNA, 21 bp, Homo sapiens
cacccacttartgttctgaaa

SEQ ID NO: 11066 - DNA, 21 bp, Homo sapiens
atatacctccygattcctcaa

SEQ ID NO: 11067 - DNA, 21 bp, Homo sapiens
ttgtctttcayaccaaatgca

SEQ ID NO: 11068 - DNA, 21 bp, Homo sapiens
atgctctgaamcctttcaagc

SEQ ID NO: 11069 - DNA, 21 bp, Homo sapiens
ataatgattayagttatggcc

SEQ ID NO: 11070 - DNA, 21 bp, Homo sapiens
gaactgtgctrtgttaggtga

SEQ ID NO: 11071 - DNA, 21 bp, Homo sapiens
aaacatgtaascaagaaacag

SEQ ID NO: 11072 - DNA, 21 bp, Homo sapiens
ccagctctagytgatgtgagt

SEQ ID NO: 11073 - DNA, 21 bp, Homo sapiens
gaaatattgtrggtgcaaagg

SEQ ID NO: 11074 - DNA, 21 bp, Homo sapiens
agcataacacrtctagtcctt

SEQ ID NO: 11075 - DNA, 21 bp, Homo sapiens
atgtgggagaycagggaatgc

SEQ ID NO: 11076 - DNA, 21 bp, Homo sapiens
ggaaaaaaaayatgagaaaat

SEQ ID NO: 11077 - DNA, 21 bp, Homo sapiens
ggcatttatcrggttgtcctc

SEQ ID NO: 11078 - DNA, 21 bp, Homo sapiens
tttccatagcrttagtatatt

SEQ ID NO: 11079 - DNA, 21 bp, Homo sapiens
tgtagatgttkaactagggaa

SEQ ID NO: 11080 - DNA, 21 bp, Homo sapiens
cccatagtcawgtctctcccc

SEQ ID NO: 11081 - DNA, 21 bp, Homo sapiens
tatctcccacyttgacgtcat

SEQ ID NO: 11082 - DNA, 21 bp, Homo sapiens
aaggtaataayacattcagta

SEQ ID NO: 11083 - DNA, 21 bp, Homo sapiens
gcacccactawctttgctaag

SEQ ID NO: 11084 - DNA, 21 bp, Homo sapiens
agaatttagartggccaggag

SEQ ID NO: 11085 - DNA, 21 bp, Homo sapiens
gcacaatcaaracttataaaa

SEQ ID NO: 11086 - DNA, 21 bp, Homo sapiens
ctcaactcaayggctttcttt

SEQ ID NO: 11087 - DNA, 21 bp, Homo sapiens
caccaaggaartgaaagatga

SEQ ID NO: 11088 - DNA, 21 bp, Homo sapiens
aaaagaagagytttacatgcc

SEQ ID NO: 11089 - DNA, 21 bp, Homo sapiens
cttggttagawgagtgaactt

SEQ ID NO: 11090 - DNA, 21 bp, Homo sapiens
cagaatgccasgcacataata

SEQ ID NO: 11091 - DNA, 21 bp, Homo sapiens
agcgggggcaktgggttacat

SEQ ID NO: 11092 - DNA, 21 bp, Homo sapiens
attggcagagrctttaaaagg

SEQ ID NO: 11093 - DNA, 21 bp, Homo sapiens
gaaatcttatycacacttgat

SEQ ID NO: 11094 - DNA, 21 bp, Homo sapiens
aaagaaaaaayaagcctatat

SEQ ID NO: 11095 - DNA, 21 bp, Homo sapiens
attttatcgcwtctaaaaata

SEQ ID NO: 11096 - DNA, 21 bp, Homo sapiens
catttaaaaamtttctgtcct

SEQ ID NO: 11097 - DNA, 21 bp, Homo sapiens
tacgtcaccayttattaggct

SEQ ID NO: 11098 - DNA, 21 bp, Homo sapiens
ggtggaatttyagtgatttag

SEQ ID NO: 11099 - DNA, 21 bp, Homo sapiens
agcatttttcmgggacataaa

SEQ ID NO: 11100 - DNA, 21 bp, Homo sapiens
agcccttcacrgtggatgaag

SEQ ID NO: 11101 - DNA, 21 bp, Homo sapiens
cagaacataakacgcattacg

SEQ ID NO: 11102 - DNA, 21 bp, Homo sapiens
aaaacaggctktcattgtctt

SEQ ID NO: 11103 - DNA, 21 bp, Homo sapiens
gttggacagayggttggttga

SEQ ID NO: 11104 - DNA, 21 bp, Homo sapiens
ttgacaaaagrgttttattct

SEQ ID NO: 11105 - DNA, 21 bp, Homo sapiens
ctgtaataatytgtggttctg

SEQ ID NO: 11106 - DNA, 21 bp, Homo sapiens
aattttagaawcctgattatt

SEQ ID NO: 11107 - DNA, 21 bp, Homo sapiens
ttctcctctgyttgcagtttt

SEQ ID NO: 11108 - DNA, 21 bp, Homo sapiens
cagcgctaaawatctcatatg

SEQ ID NO: 11109 - DNA, 21 bp, Homo sapiens
atagacaatgygctcttagag

SEQ ID NO: 11110 - DNA, 21 bp, Homo sapiens
ctccaaatgtytgcaggatca

SEQ ID NO: 11111 - DNA, 21 bp, Homo sapiens
ctgagcacccracccctttct

SEQ ID NO: 11112 - DNA, 21 bp, Homo sapiens
tgcagctcctrggttatggtg

SEQ ID NO: 11113 - DNA, 21 bp, Homo sapiens
ctagtgtggtrctaatcctat

SEQ ID NO: 11114 - DNA, 21 bp, Homo sapiens
cagtgatcccwtcagaatgat

SEQ ID NO: 11115 - DNA, 21 bp, Homo sapiens
ggtcgatatartgatttctga

SEQ ID NO: 11116 - DNA, 21 bp, Homo sapiens
ttcctatatgwccctgccagg

SEQ ID NO: 11117 - DNA, 21 bp, Homo sapiens
aatctcataaytgttcaactg

SEQ ID NO: 11118 - DNA, 21 bp, Homo sapiens
atattttattsgtagcaagga

SEQ ID NO: 11119 - DNA, 21 bp, Homo sapiens
ttgctcttaamgaatctgaaa

SEQ ID NO: 11120 - DNA, 21 bp, Homo sapiens
gaactggcagrtgatgatttg

SEQ ID NO: 11121 - DNA, 21 bp, Homo sapiens
ttggcagatgycaacaatccc

SEQ ID NO: 11122 - DNA, 21 bp, Homo sapiens
caatggctttkagttccaagt

SEQ ID NO: 11123 - DNA, 21 bp, Homo sapiens
aaaattacgcrtagaattgta

SEQ ID NO: 11124 - DNA, 21 bp, Homo sapiens
aggggtaactsttcctccatt

SEQ ID NO: 11125 - DNA, 21 bp, Homo sapiens
cttggaaatgktctgcaatca

SEQ ID NO: 11126 - DNA, 21 bp, Homo sapiens
ttgaacataakgcccaaatca

SEQ ID NO: 11127 - DNA, 21 bp, Homo sapiens
gtaaaagatcytgtcctctga

SEQ ID NO: 11128 - DNA, 21 bp, Homo sapiens
attcatatatytgaaaatttt

SEQ ID NO: 11129 - DNA, 21 bp, Homo sapiens
gctcttctagyagcagtggaa

SEQ ID NO: 11130 - DNA, 21 bp, Homo sapiens
aaaactctgartataacagga

SEQ ID NO: 11131 - DNA, 21 bp, Homo sapiens
cttcaatgttyatttacttat

SEQ ID NO: 11132 - DNA, 21 bp, Homo sapiens
gacttggctgkctgtctggct

SEQ ID NO: 11133 - DNA, 21 bp, Homo sapiens
attcctaccartctttacagt

SEQ ID NO: 11134 - DNA, 21 bp, Homo sapiens
attccaactgyttaatgattt

SEQ ID NO: 11135 - DNA, 21 bp, Homo sapiens
cttgaaaatgyttctgtctgt

SEQ ID NO: 11136 - DNA, 21 bp, Homo sapiens
gaaaacttatrgaattgaaga

SEQ ID NO: 11137 - DNA, 21 bp, Homo sapiens
atgaaaagctygtggagtttg

SEQ ID NO: 11138 - DNA, 21 bp, Homo sapiens
ttcctgtaagygctagtcatt

SEQ ID NO: 11139 - DNA, 21 bp, Homo sapiens
caagagggttrtggtatctgt

SEQ ID NO: 11140 - DNA, 21 bp, Homo sapiens
aagcttctatyctctcctgga

SEQ ID NO: 11141 - DNA, 21 bp, Homo sapiens
acagttggttyagtgcttgct

SEQ ID NO: 11142 - DNA, 21 bp, Homo sapiens
ttcagagttaytctctattct

SEQ ID NO: 11143 - DNA, 21 bp, Homo sapiens
aactttattcygctggttcta

SEQ ID NO: 11144 - DNA, 21 bp, Homo sapiens
tgttttacttytctagtcccc

SEQ ID NO: 11145 - DNA, 21 bp, Homo sapiens
gttgctgtgargattttcaat

SEQ ID NO: 11146 - DNA, 21 bp, Homo sapiens
taatttcttcmggcctggtaa

SEQ ID NO: 11147 - DNA, 21 bp, Homo sapiens
ctttgagtggwcgttgtggca

SEQ ID NO: 11148 - DNA, 21 bp, Homo sapiens
ccagcccaatyctatgagtgt

SEQ ID NO: 11149 - DNA, 21 bp, Homo sapiens
ttgcctgggamgagaagaaga

SEQ ID NO: 11150 - DNA, 21 bp, Homo sapiens
acaaccatgaygagaacaaag

SEQ ID NO: 11151 - DNA, 21 bp, Homo sapiens
aaagtagtttytacctcttag

SEQ ID NO: 11152 - DNA, 21 bp, Homo sapiens
aaatgtaaaaygttgttgggg

SEQ ID NO: 11153 - DNA, 21 bp, Homo sapiens
tattctaaaakgataatagtt

SEQ ID NO: 11154 - DNA, 21 bp, Homo sapiens
atttttaaatycctctcccga

SEQ ID NO: 11155 - DNA, 21 bp, Homo sapiens
tccagaaattrgcaatgcagt

SEQ ID NO: 11156 - DNA, 21 bp, Homo sapiens
gtcactgtgcrgagattgaag

SEQ ID NO: 11157 - DNA, 21 bp, Homo sapiens
gccatcccaaytgcttgatgc

SEQ ID NO: 11158 - DNA, 21 bp, Homo sapiens
tactagaattsttatttttgg

SEQ ID NO: 11159 - DNA, 21 bp, Homo sapiens
gtttgtcatgrgtagttcagt

SEQ ID NO: 11160 - DNA, 21 bp, Homo sapiens
atatacaaacrgtcgatgtcc

SEQ ID NO: 11161 - DNA, 21 bp, Homo sapiens
aagggagatawgtgttgtgtc

SEQ ID NO: 11162 - DNA, 21 bp, Homo sapiens
gatggctccaytacacattgg

SEQ ID NO: 11163 - DNA, 21 bp, Homo sapiens
tttacaaagcsctaacactat

SEQ ID NO: 11164 - DNA, 21 bp, Homo sapiens
aaactttttcrccggcaactc

SEQ ID NO: 11165 - DNA, 21 bp, Homo sapiens
tgtatttcttmcaaggccttc

SEQ ID NO: 11166 - DNA, 21 bp, Homo sapiens
aatgtggagaytaaagccata

SEQ ID NO: 11167 - DNA, 21 bp, Homo sapiens
aaaatttctayaggtatctaa

SEQ ID NO: 11168 - DNA, 21 bp, Homo sapiens
tgtaaacaaaytgagcttatt

SEQ ID NO: 11169 - DNA, 21 bp, Homo sapiens
ctgttttggartaaaaacttc

SEQ ID NO: 11170 - DNA, 21 bp, Homo sapiens
taataacttaratgcttatat

SEQ ID NO: 11171 - DNA, 21 bp, Homo sapiens
aattgctgccsaaacctgcta

SEQ ID NO: 11172 - DNA, 21 bp, Homo sapiens
atgacactcarcttgtcatct

SEQ ID NO: 11173 - DNA, 21 bp, Homo sapiens
aaggccctaakccagaaataa

SEQ ID NO: 11174 - DNA, 21 bp, Homo sapiens
taaaaaagttkcatcaaaaat

SEQ ID NO: 11175 - DNA, 21 bp, Homo sapiens
gttttactacyataggtagtt

SEQ ID NO: 11176 - DNA, 21 bp, Homo sapiens
gaacataaggyttccactacc

SEQ ID NO: 11177 - DNA, 21 bp, Homo sapiens
tccattttgaygaacagttgt

SEQ ID NO: 11178 - DNA, 21 bp, Homo sapiens
ttttgaagaartgcctctatt

SEQ ID NO: 11179 - DNA, 21 bp, Homo sapiens
attcaccaatsacctttttca

SEQ ID NO: 11180 - DNA, 21 bp, Homo sapiens
cattattgagratatgtgact

SEQ ID NO: 11181 - DNA, 21 bp, Homo sapiens
aacacgttaamcgaagtactg

SEQ ID NO: 11182 - DNA, 21 bp, Homo sapiens
taacaccttartattgacttt

SEQ ID NO: 11183 - DNA, 21 bp, Homo sapiens
aactgagaaartgaaactttt

SEQ ID NO: 11184 - DNA, 21 bp, Homo sapiens
taaaaagtacrtaccctacct

SEQ ID NO: 11185 - DNA, 21 bp, Homo sapiens
aaacacacttyttgattaatg

SEQ ID NO: 11186 - DNA, 21 bp, Homo sapiens
cattgggtccrtgaatgcttg

SEQ ID NO: 11187 - DNA, 21 bp, Homo sapiens
ttggcagaccrtgcaagcagc

SEQ ID NO: 11188 - DNA, 21 bp, Homo sapiens
tggaaattagscgtccaaaag

SEQ ID NO: 11189 - DNA, 21 bp, Homo sapiens
aagtacagacrattataaccc

SEQ ID NO: 11190 - DNA, 21 bp, Homo sapiens
ggctctgagaycaggaatctt

SEQ ID NO: 11191 - DNA, 21 bp, Homo sapiens
aacacaaagastccagagccc

SEQ ID NO: 11192 - DNA, 21 bp, Homo sapiens
ttgtattatcragggttttgg

SEQ ID NO: 11193 - DNA, 21 bp, Homo sapiens
cccatttttaygtgaacacat

SEQ ID NO: 11194 - DNA, 21 bp, Homo sapiens
tttgcatggcrtacctttaca

SEQ ID NO: 11195 - DNA, 21 bp, Homo sapiens
ctaacccacartaagtaggca

SEQ ID NO: 11196 - DNA, 21 bp, Homo sapiens
ctttacagttkctatgctcac

SEQ ID NO: 11197 - DNA, 21 bp, Homo sapiens
ttaagaatgargtggtgagtt

SEQ ID NO: 11198 - DNA, 21 bp, Homo sapiens
acattatgaaraatatcagta

SEQ ID NO: 11199 - DNA, 21 bp, Homo sapiens
attactaaatyattctgatag

SEQ ID NO: 11200 - DNA, 21 bp, Homo sapiens
cgatgaatttkagaattacca

SEQ ID NO: 11201 - DNA, 21 bp, Homo sapiens
atacagctgawcatgtgtggc

SEQ ID NO: 11202 - DNA, 21 bp, Homo sapiens
tattttagaaragtatcaaag

SEQ ID NO: 11203 - DNA, 21 bp, Homo sapiens
tgtgaggcatyattacatgtg

SEQ ID NO: 11204 - DNA, 21 bp, Homo sapiens
attgcgttcaytttccctgca

SEQ ID NO: 11205 - DNA, 21 bp, Homo sapiens
aggttatcatrccagatacat

SEQ ID NO: 11206 - DNA, 21 bp, Homo sapiens
ctattttacaygaccacacag

SEQ ID NO: 11207 - DNA, 21 bp, Homo sapiens
ttaccaataayaagaactaag

SEQ ID NO: 11208 - DNA, 21 bp, Homo sapiens
atgaaaccagrttccaaagtg

SEQ ID NO: 11209 - DNA, 21 bp, Homo sapiens
accttttgtcygaaggctggt

SEQ ID NO: 11210 - DNA, 21 bp, Homo sapiens
ttcagatctamccttcataat

SEQ ID NO: 11211 - DNA, 21 bp, Homo sapiens
ctgactagaayctgtggagaa

SEQ ID NO: 11212 - DNA, 21 bp, Homo sapiens
tgtctggaaaktcataaggga

SEQ ID NO: 11213 - DNA, 21 bp, Homo sapiens
gccaattgtaratatttgtca

SEQ ID NO: 11214 - DNA, 21 bp, Homo sapiens
ggcattggtayggcatccctc

SEQ ID NO: 11215 - DNA, 21 bp, Homo sapiens
tcagtattcamatgtaattat

SEQ ID NO: 11216 - DNA, 21 bp, Homo sapiens
tgcatggtgcmgaaaagcttt

SEQ ID NO: 11217 - DNA, 21 bp, Homo sapiens
catcaaatgcrctgattcctt

SEQ ID NO: 11218 - DNA, 21 bp, Homo sapiens
tagtttaaaamacaaggcatc

SEQ ID NO: 11219 - DNA, 21 bp, Homo sapiens
ttagagtaacrtttaaaaagt

SEQ ID NO: 11220 - DNA, 21 bp, Homo sapiens
agagaagtagrctctttcctg

SEQ ID NO: 11221 - DNA, 21 bp, Homo sapiens
caagattatcytaactccagt

SEQ ID NO: 11222 - DNA, 21 bp, Homo sapiens
cctaggacttyagacaaccac

SEQ ID NO: 11223 - DNA, 21 bp, Homo sapiens
tattgtgtctytagatataaa

SEQ ID NO: 11224 - DNA, 21 bp, Homo sapiens
tggagaaaggmatgtgcaaat

SEQ ID NO: 11225 - DNA, 21 bp, Homo sapiens
actggatgatraagggctgaa

SEQ ID NO: 11226 - DNA, 21 bp, Homo sapiens
aagtacccttygttgctaagc

SEQ ID NO: 11227 - DNA, 21 bp, Homo sapiens
gaagaagccaygttgaatgtc

SEQ ID NO: 11228 - DNA, 21 bp, Homo sapiens
cttgaaatccrccacacagcc

SEQ ID NO: 11229 - DNA, 21 bp, Homo sapiens
caatacactcrccccaggcag

SEQ ID NO: 11230 - DNA, 21 bp, Homo sapiens
gtatatctctscatttcacca

SEQ ID NO: 11231 - DNA, 21 bp, Homo sapiens
gctgtattgamgcaagaacac

SEQ ID NO: 11232 - DNA, 21 bp, Homo sapiens
tggctgtaagkctttagtctt

SEQ ID NO: 11233 - DNA, 21 bp, Homo sapiens
ccgtcatttcrgcatcgtgct

SEQ ID NO: 11234 - DNA, 21 bp, Homo sapiens
tgctaagggtkgagaagtgaa

SEQ ID NO: 11235 - DNA, 21 bp, Homo sapiens
tacataatacstgcctctctt

SEQ ID NO: 11236 - DNA, 21 bp, Homo sapiens
tagcccctttygtttgatgat

SEQ ID NO: 11237 - DNA, 21 bp, Homo sapiens
ttatgggcccrtgagtccttg

SEQ ID NO: 11238 - DNA, 21 bp, Homo sapiens
gtacttctacrtctagttcag

SEQ ID NO: 11239 - DNA, 21 bp, Homo sapiens
gctctgggtcsataagctttt

SEQ ID NO: 11240 - DNA, 21 bp, Homo sapiens
gaacgtgtttrtttgaaacag

SEQ ID NO: 11241 - DNA, 21 bp, Homo sapiens
aaatagctctrtatgctgaag

SEQ ID NO: 11242 - DNA, 21 bp, Homo sapiens
agaataaaaargtagtgcctg

SEQ ID NO: 11243 - DNA, 21 bp, Homo sapiens
ttcccgttttmttagcaatag

SEQ ID NO: 11244 - DNA, 21 bp, Homo sapiens
gaaaccagtaytttgagagtt

SEQ ID NO: 11245 - DNA, 21 bp, Homo sapiens
atcagtgcaamcatatactaa

SEQ ID NO: 11246 - DNA, 21 bp, Homo sapiens
tgttgagggasaagatgacca

SEQ ID NO: 11247 - DNA, 21 bp, Homo sapiens
gatgccttgtrggagaagatc

SEQ ID NO: 11248 - DNA, 21 bp, Homo sapiens
agatggggagratattgttac

SEQ ID NO: 11249 - DNA, 21 bp, Homo sapiens
tatgcagacasagcttatgtg

SEQ ID NO: 11250 - DNA, 21 bp, Homo sapiens
cttggagatcrtggttccctt

SEQ ID NO: 11251 - DNA, 21 bp, Homo sapiens
gcttcctctcyttccttagct

SEQ ID NO: 11252 - DNA, 21 bp, Homo sapiens
gaatggcgtcytgcagttggc

SEQ ID NO: 11253 - DNA, 21 bp, Homo sapiens
tctgctgcctrcaacccttgg

SEQ ID NO: 11254 - DNA, 21 bp, Homo sapiens
gagccctgagygaaggtttct

SEQ ID NO: 11255 - DNA, 21 bp, Homo sapiens
caggtttcaargagcgagtag

SEQ ID NO: 11256 - DNA, 21 bp, Homo sapiens
cccaggctcayagtagggtgt

SEQ ID NO: 11257 - DNA, 21 bp, Homo sapiens
agtggctggcrtacatttcca

SEQ ID NO: 11258 - DNA, 21 bp, Homo sapiens
tcatactgaaygccctcccca

SEQ ID NO: 11259 - DNA, 21 bp, Homo sapiens
atggacctcarattcctcatg

SEQ ID NO: 11260 - DNA, 21 bp, Homo sapiens
cataccacagyggcactagct

SEQ ID NO: 11261 - DNA, 21 bp, Homo sapiens
tgtggaggcargataaataag

SEQ ID NO: 11262 - DNA, 21 bp, Homo sapiens
ctgttacctcmactgatctta

SEQ ID NO: 11263 - DNA, 21 bp, Homo sapiens
acagtaaaccrtattaataca

SEQ ID NO: 11264 - DNA, 21 bp, Homo sapiens
gatcttgccayctgatgtcag

SEQ ID NO: 11265 - DNA, 21 bp, Homo sapiens
gaataaataaygcccaagtct

SEQ ID NO: 11266 - DNA, 21 bp, Homo sapiens
agtaacctgarctcctaaggc

SEQ ID NO: 11267 - DNA, 21 bp, Homo sapiens
ttatactaacscaacaaagta

SEQ ID NO: 11268 - DNA, 21 bp, Homo sapiens
gtttaacatgscatgatttgg

SEQ ID NO: 11269 - DNA, 21 bp, Homo sapiens
aaagccatggyctgtaattac

SEQ ID NO: 11270 - DNA, 21 bp, Homo sapiens
tgcttgacatyctccctgcaa

SEQ ID NO: 11271 - DNA, 21 bp, Homo sapiens
aaaggcttctmtcaagataca

SEQ ID NO: 11272 - DNA, 21 bp, Homo sapiens
tgctttgatarttctgcaaac

SEQ ID NO: 11273 - DNA, 21 bp, Homo sapiens
atccccctgayttaatcactt

SEQ ID NO: 11274 - DNA, 21 bp, Homo sapiens
gtggtgggggrcagagggatt

SEQ ID NO: 11275 - DNA, 21 bp, Homo sapiens
cccatacaacycaacatttcc

SEQ ID NO: 11276 - DNA, 21 bp, Homo sapiens
aataatagccytggtacattc

SEQ ID NO: 11277 - DNA, 21 bp, Homo sapiens
tgtaggaatastctcataaaa

SEQ ID NO: 11278 - DNA, 21 bp, Homo sapiens
ccaatgctgascattctagta

SEQ ID NO: 11279 - DNA, 21 bp, Homo sapiens
aaatgttgctragcatggaga

SEQ ID NO: 11280 - DNA, 21 bp, Homo sapiens
tttagtgaggmgctggaggac

SEQ ID NO: 11281 - DNA, 21 bp, Homo sapiens
acttatcctcrtgcttcattt

SEQ ID NO: 11282 - DNA, 21 bp, Homo sapiens
attatgccacratttacatgg

SEQ ID NO: 11283 - DNA, 21 bp, Homo sapiens
cctgtagtttwaaaaaagtct

SEQ ID NO: 11284 - DNA, 21 bp, Homo sapiens
ctcagcccaayagggaatacc

SEQ ID NO: 11285 - DNA, 21 bp, Homo sapiens
taggagaatarcatcccaaaa

SEQ ID NO: 11286 - DNA, 21 bp, Homo sapiens
gtttcttcgarataaaattgt

SEQ ID NO: 11287 - DNA, 21 bp, Homo sapiens
tctcttgtaayacttcatcaa

SEQ ID NO: 11288 - DNA, 21 bp, Homo sapiens
atctggcagarcaagagaaaa

SEQ ID NO: 11289 - DNA, 21 bp, Homo sapiens
tacaggtcacraagtatggat

SEQ ID NO: 11290 - DNA, 21 bp, Homo sapiens
ggcacaaagasaggaaagggt

SEQ ID NO: 11291 - DNA, 21 bp, Homo sapiens
tgcaacattcrttaagtgagt

SEQ ID NO: 11292 - DNA, 21 bp, Homo sapiens
acgcctccctrtacctgaggg

SEQ ID NO: 11293 - DNA, 21 bp, Homo sapiens
gtgcaaaaggrtacacagtat

SEQ ID NO: 11294 - DNA, 21 bp, Homo sapiens
aactgtggaarggcatttggc

SEQ ID NO: 11295 - DNA, 21 bp, Homo sapiens
agtgtgaggcrgctcctattg

SEQ ID NO: 11296 - DNA, 21 bp, Homo sapiens
aactaaaaaawttgaagaaag

SEQ ID NO: 11297 - DNA, 21 bp, Homo sapiens
cttgcagtackccagggcccg

SEQ ID NO: 11298 - DNA, 21 bp, Homo sapiens
aatctcacaaraagaggctgg

SEQ ID NO: 11299 - DNA, 21 bp, Homo sapiens
tcgtaaaaacyattatccagc

SEQ ID NO: 11300 - DNA, 21 bp, Homo sapiens
tctgtcagcargaacttactt

SEQ ID NO: 11301 - DNA, 21 bp, Homo sapiens
aactgagacastctgtaacat

SEQ ID NO: 11302 - DNA, 21 bp, Homo sapiens
actgtcctccrgtctcaccag

SEQ ID NO: 11303 - DNA, 21 bp, Homo sapiens
gtcaagctacmtgactgaatc

SEQ ID NO: 11304 - DNA, 21 bp, Homo sapiens
gcagtttgggkagaaggagac

SEQ ID NO: 11305 - DNA, 21 bp, Homo sapiens
acagtgctccrggccactaga

SEQ ID NO: 11306 - DNA, 21 bp, Homo sapiens
tctctaaattkcctctttggt

SEQ ID NO: 11307 - DNA, 21 bp, Homo sapiens
acagtattgtkgattcacaaa

SEQ ID NO: 11308 - DNA, 21 bp, Homo sapiens
ctaagaagcayttagcaccca

SEQ ID NO: 11309 - DNA, 21 bp, Homo sapiens
atgcaagcacrgtcttcctag

SEQ ID NO: 11310 - DNA, 21 bp, Homo sapiens
gacaaaagagmaaatagggtt

SEQ ID NO: 11311 - DNA, 21 bp, Homo sapiens
acttcatccarccaaacctgt

SEQ ID NO: 11312 - DNA, 21 bp, Homo sapiens
acaaatatccyacttttctcc

SEQ ID NO: 11313 - DNA, 21 bp, Homo sapiens
ttataaacttycctattgaca

SEQ ID NO: 11314 - DNA, 21 bp, Homo sapiens
catcataatayaatcttccat

SEQ ID NO: 11315 - DNA, 21 bp, Homo sapiens
gagcttaccamagggtaatga

SEQ ID NO: 11316 - DNA, 21 bp, Homo sapiens
gattaagtaayttaggcatgt

SEQ ID NO: 11317 - DNA, 21 bp, Homo sapiens
aatgacttccrcttgaaataa

SEQ ID NO: 11318 - DNA, 21 bp, Homo sapiens
tggccccttaygtgattcatg

SEQ ID NO: 11319 - DNA, 21 bp, Homo sapiens
gttctaggtcmggtccttaat

SEQ ID NO: 11320 - DNA, 21 bp, Homo sapiens
aaattcttcaktcctagtgga

SEQ ID NO: 11321 - DNA, 21 bp, Homo sapiens
gggtacctctkaccgctgggt

SEQ ID NO: 11322 - DNA, 21 bp, Homo sapiens
aaaggtcaccygcaatccatg

SEQ ID NO: 11323 - DNA, 21 bp, Homo sapiens
atcaggattargggtgttttg

SEQ ID NO: 11324 - DNA, 21 bp, Homo sapiens
tcaataactarctctttgtag

SEQ ID NO: 11325 - DNA, 21 bp, Homo sapiens
tcagtatttgrgattttttca

SEQ ID NO: 11326 - DNA, 21 bp, Homo sapiens
caaaactagcrgatggtttag

SEQ ID NO: 11327 - DNA, 21 bp, Homo sapiens
caaagttttaycttccattga

SEQ ID NO: 11328 - DNA, 21 bp, Homo sapiens
ctatcttgtartgaatgtgga

SEQ ID NO: 11329 - DNA, 21 bp, Homo sapiens
gggtgcaataygtagtatgat

SEQ ID NO: 11330 - DNA, 21 bp, Homo sapiens
agaaaaccttytgttttaagt

SEQ ID NO: 11331 - DNA, 21 bp, Homo sapiens
atatgcatgcrgttagaacat

SEQ ID NO: 11332 - DNA, 21 bp, Homo sapiens
ctaacgatccyggcaaagtac

SEQ ID NO: 11333 - DNA, 21 bp, Homo sapiens
tatgagaaaascctgggacta

SEQ ID NO: 11334 - DNA, 21 bp, Homo sapiens
gaggtgtgtgyaccatgactt

SEQ ID NO: 11335 - DNA, 21 bp, Homo sapiens
gagtgcctcaytcatgggaca

SEQ ID NO: 11336 - DNA, 21 bp, Homo sapiens
catattccacygtattgccca

SEQ ID NO: 11337 - DNA, 21 bp, Homo sapiens
cagtggatgayggatatattt

SEQ ID NO: 11338 - DNA, 21 bp, Homo sapiens
atctgctcttsagaaatacta

SEQ ID NO: 11339 - DNA, 21 bp, Homo sapiens
aaacagctaasattttggtag

SEQ ID NO: 11340 - DNA, 21 bp, Homo sapiens
tcattggtaarcaaaacgtat

SEQ ID NO: 11341 - DNA, 21 bp, Homo sapiens
ctgggccaccyagatgagttg

SEQ ID NO: 11342 - DNA, 21 bp, Homo sapiens
ctttgaaaggyagaaaatact

SEQ ID NO: 11343 - DNA, 21 bp, Homo sapiens
tctgttaggcygaaaagacaa

SEQ ID NO: 11344 - DNA, 21 bp, Homo sapiens
cccataacackcccttaatac

SEQ ID NO: 11345 - DNA, 21 bp, Homo sapiens
cccctataaakgaatgatttc

SEQ ID NO: 11346 - DNA, 21 bp, Homo sapiens
tgagccacttrggaaattatt

SEQ ID NO: 11347 - DNA, 21 bp, Homo sapiens
ttcactacacrtcagtctagt

SEQ ID NO: 11348 - DNA, 21 bp, Homo sapiens
aaagctaggargtacttgcca

SEQ ID NO: 11349 - DNA, 21 bp, Homo sapiens
ttccttgagtrtgtccaggcc

SEQ ID NO: 11350 - DNA, 21 bp, Homo sapiens
taatgaatggrtttagctgtg

SEQ ID NO: 11351 - DNA, 21 bp, Homo sapiens
agaaccatacrcttaattccc

SEQ ID NO: 11352 - DNA, 21 bp, Homo sapiens
aggttattgcragtgttttga

SEQ ID NO: 11353 - DNA, 21 bp, Homo sapiens
aaaatactccrgtttgctttt

SEQ ID NO: 11354 - DNA, 21 bp, Homo sapiens
gtttagtggtmatgtcaatgt

SEQ ID NO: 11355 - DNA, 21 bp, Homo sapiens
aacgacatcartataacagaa

SEQ ID NO: 11356 - DNA, 21 bp, Homo sapiens
tttaaaacagsccaaaaaatg

SEQ ID NO: 11357 - DNA, 21 bp, Homo sapiens
gaaccagtacrgtgtgtaaga

SEQ ID NO: 11358 - DNA, 21 bp, Homo sapiens
ttgtccattcytgaattcttc

SEQ ID NO: 11359 - DNA, 21 bp, Homo sapiens
acagagcaatygttacttact

SEQ ID NO: 11360 - DNA, 21 bp, Homo sapiens
ctatacaggtmctgagatgga

SEQ ID NO: 11361 - DNA, 21 bp, Homo sapiens
aatgggttaartgtatgaatc

SEQ ID NO: 11362 - DNA, 21 bp, Homo sapiens
tcaaccttctsttagtactta

SEQ ID NO: 11363 - DNA, 21 bp, Homo sapiens
aacttttatgygctgagccag

SEQ ID NO: 11364 - DNA, 21 bp, Homo sapiens
ttggttgaaawgataaatcta

SEQ ID NO: 11365 - DNA, 21 bp, Homo sapiens
caagaaaaacrgtgaaagcca

SEQ ID NO: 11366 - DNA, 21 bp, Homo sapiens
actttcacaamaagaagttca

SEQ ID NO: 11367 - DNA, 21 bp, Homo sapiens
taagagtattrgtaggaattt

SEQ ID NO: 11368 - DNA, 21 bp, Homo sapiens
tagccatttcrtttttggcta

SEQ ID NO: 11369 - DNA, 21 bp, Homo sapiens
gtccagagatrtttaattttc

SEQ ID NO: 11370 - DNA, 21 bp, Homo sapiens
caaacactcartttaatgttt

SEQ ID NO: 11371 - DNA, 21 bp, Homo sapiens
tccacgcccaytaagtaggga

SEQ ID NO: 11372 - DNA, 21 bp, Homo sapiens
gaagggtcatytctaccagtc

SEQ ID NO: 11373 - DNA, 21 bp, Homo sapiens
ttcctagcaakcacattcaaa

SEQ ID NO: 11374 - DNA, 21 bp, Homo sapiens
cgagggagagrccttttacct

SEQ ID NO: 11375 - DNA, 21 bp, Homo sapiens
tttttcaggtrgatgactttt

SEQ ID NO: 11376 - DNA, 21 bp, Homo sapiens
acaactgtcaytgaaaattaa

SEQ ID NO: 11377 - DNA, 21 bp, Homo sapiens
tggaattaagrgacttttttt

SEQ ID NO: 11378 - DNA, 21 bp, Homo sapiens
catgtaaagtrtcaaaatcca

SEQ ID NO: 11379 - DNA, 21 bp, Homo sapiens
ttttgatccarttgtactatt

SEQ ID NO: 11380 - DNA, 21 bp, Homo sapiens
ggtcttaagtmcagattaggc

SEQ ID NO: 11381 - DNA, 21 bp, Homo sapiens
gattacagctragcagaggcc

SEQ ID NO: 11382 - DNA, 21 bp, Homo sapiens
ctaagaatackttaaaataca

SEQ ID NO: 11383 - DNA, 21 bp, Homo sapiens
ctactgatatyaaaaaggaga

SEQ ID NO: 11384 - DNA, 21 bp, Homo sapiens
attgagggtaygagttaagtt

SEQ ID NO: 11385 - DNA, 21 bp, Homo sapiens
attcaaccaawtccttttttt

SEQ ID NO: 11386 - DNA, 21 bp, Homo sapiens
accatttaaarggttacaaag

SEQ ID NO: 11387 - DNA, 21 bp, Homo sapiens
gccagtctacrtcctgcagag

SEQ ID NO: 11388 - DNA, 21 bp, Homo sapiens
cattattcttyataacacatg

SEQ ID NO: 11389 - DNA, 21 bp, Homo sapiens
caagaagagckatgaattcaa

SEQ ID NO: 11390 - DNA, 21 bp, Homo sapiens
tcttggcattkgttacaataa

SEQ ID NO: 11391 - DNA, 21 bp, Homo sapiens
catgaaattcraaacctcagt

SEQ ID NO: 11392 - DNA, 21 bp, Homo sapiens
ttctagtttcktgatacattt

SEQ ID NO: 11393 - DNA, 21 bp, Homo sapiens
ttattcagaartagatttacc

SEQ ID NO: 11394 - DNA, 21 bp, Homo sapiens
cacgcccaaayccctgctcat

SEQ ID NO: 11395 - DNA, 21 bp, Homo sapiens
aatcttcaacrtattttgccc

SEQ ID NO: 11396 - DNA, 21 bp, Homo sapiens
atctttaagaycatcacaatt

SEQ ID NO: 11397 - DNA, 21 bp, Homo sapiens
tgccactctcwttgctggaaa

SEQ ID NO: 11398 - DNA, 21 bp, Homo sapiens
acaatacataygagaacggtg

SEQ ID NO: 11399 - DNA, 21 bp, Homo sapiens
tattaaattgytggtggctga

SEQ ID NO: 11400 - DNA, 21 bp, Homo sapiens
tcatgaggcascatctttcac

SEQ ID NO: 11401 - DNA, 21 bp, Homo sapiens
aaacaatcaayatgctgagaa

SEQ ID NO: 11402 - DNA, 21 bp, Homo sapiens
tatttgacctrttttcttcat

SEQ ID NO: 11403 - DNA, 21 bp, Homo sapiens
ggtgttaatawcatgttaaga

SEQ ID NO: 11404 - DNA, 21 bp, Homo sapiens
atagaaaatascactttcttt

SEQ ID NO: 11405 - DNA, 21 bp, Homo sapiens
tatcgccactracacactcat

SEQ ID NO: 11406 - DNA, 21 bp, Homo sapiens
aaaaactgccygtttataata

SEQ ID NO: 11407 - DNA, 21 bp, Homo sapiens
cagagcatcartatcagtcac

SEQ ID NO: 11408 - DNA, 21 bp, Homo sapiens
ataagggattrgaattcctga

SEQ ID NO: 11409 - DNA, 21 bp, Homo sapiens
ttggttacctycttcttgaaa

SEQ ID NO: 11410 - DNA, 21 bp, Homo sapiens
atcacttctayctgtttgtct

SEQ ID NO: 11411 - DNA, 21 bp, Homo sapiens
tcaccatcctygaaaaaattg

SEQ ID NO: 11412 - DNA, 21 bp, Homo sapiens
ctcatgcatgwcatttcctct

SEQ ID NO: 11413 - DNA, 21 bp, Homo sapiens
agtagtttgtrcgctttttgt

SEQ ID NO: 11414 - DNA, 21 bp, Homo sapiens
caaatgattckctctggtcat

SEQ ID NO: 11415 - DNA, 21 bp, Homo sapiens
aattcaaatgrtcttcccaag

SEQ ID NO: 11416 - DNA, 21 bp, Homo sapiens
tttatttggartacttcatga

SEQ ID NO: 11417 - DNA, 21 bp, Homo sapiens
caaatatcctraaattcagat

SEQ ID NO: 11418 - DNA, 21 bp, Homo sapiens
aagcaaaaccmatgagaaatg

SEQ ID NO: 11419 - DNA, 21 bp, Homo sapiens
tttaatcagtyttaagtcaat

SEQ ID NO: 11420 - DNA, 21 bp, Homo sapiens
agttttctagrtattggaagt

SEQ ID NO: 11421 - DNA, 21 bp, Homo sapiens
aacccattctrtgatgatctt

SEQ ID NO: 11422 - DNA, 21 bp, Homo sapiens
ttacacctcartagctcctgt

SEQ ID NO: 11423 - DNA, 21 bp, Homo sapiens
atcttgatgtygatagctaaa

SEQ ID NO: 11424 - DNA, 21 bp, Homo sapiens
cttgcacccartccattccca

SEQ ID NO: 11425 - DNA, 21 bp, Homo sapiens
tttagattacrgatttttggt

SEQ ID NO: 11426 - DNA, 21 bp, Homo sapiens
tgaattgaggwgagaacatac

SEQ ID NO: 11427 - DNA, 21 bp, Homo sapiens
aaaatttatgrcacattttat

SEQ ID NO: 11428 - DNA, 21 bp, Homo sapiens
tgccattttaytgccgattta

SEQ ID NO: 11429 - DNA, 21 bp, Homo sapiens
ttatatctaakcataatttgt

SEQ ID NO: 11430 - DNA, 21 bp, Homo sapiens
gtctctaccaygatacccaag

SEQ ID NO: 11431 - DNA, 21 bp, Homo sapiens
acctactactktataagtccc

SEQ ID NO: 11432 - DNA, 21 bp, Homo sapiens
ccagggaactmtaagaaaatc

SEQ ID NO: 11433 - DNA, 21 bp, Homo sapiens
ctgaaaatgcrtctggtttct

SEQ ID NO: 11434 - DNA, 21 bp, Homo sapiens
ctatgaatgcrgaaaatttgg

SEQ ID NO: 11435 - DNA, 21 bp, Homo sapiens
agcaaggatawtagcttaact

SEQ ID NO: 11436 - DNA, 21 bp, Homo sapiens
ccaaaaaaatmacataatttg

SEQ ID NO: 11437 - DNA, 21 bp, Homo sapiens
tctcagtgtcycagcaaatat

SEQ ID NO: 11438 - DNA, 21 bp, Homo sapiens
gttgtcttgaytgtagaacac

SEQ ID NO: 11439 - DNA, 21 bp, Homo sapiens
tttatcaaacytatcatcttc

SEQ ID NO: 11440 - DNA, 21 bp, Homo sapiens
ctttcaagttwacgtattcat

SEQ ID NO: 11441 - DNA, 21 bp, Homo sapiens
gcacctcaggrgatttgctgt

SEQ ID NO: 11442 - DNA, 21 bp, Homo sapiens
gctgttgtccrgaaagtgaaa

SEQ ID NO: 11443 - DNA, 21 bp, Homo sapiens
attgctcgccmttaacacaga

SEQ ID NO: 11444 - DNA, 21 bp, Homo sapiens
acaatagatcrtctttatttg

SEQ ID NO: 11445 - DNA, 21 bp, Homo sapiens
gaagtggagaygcacccctca

SEQ ID NO: 11446 - DNA, 21 bp, Homo sapiens
aaagaggataygacccctgat

SEQ ID NO: 11447 - DNA, 21 bp, Homo sapiens
cagtgtcgtcrtcatcattta

SEQ ID NO: 11448 - DNA, 21 bp, Homo sapiens
gaagtgaaatygtttgccaca

SEQ ID NO: 11449 - DNA, 21 bp, Homo sapiens
gggtgcctgcstctccaagtc

SEQ ID NO: 11450 - DNA, 21 bp, Homo sapiens
gaggagaaacragataaagca

SEQ ID NO: 11451 - DNA, 21 bp, Homo sapiens
tggtctgcacrgcacacgggg

SEQ ID NO: 11452 - DNA, 21 bp, Homo sapiens
attgttcattsattcacttat

SEQ ID NO: 11453 - DNA, 21 bp, Homo sapiens
catgatgggaytccacacact

SEQ ID NO: 11454 - DNA, 21 bp, Homo sapiens
ttttcagcctyttgaggaatt

SEQ ID NO: 11455 - DNA, 21 bp, Homo sapiens
cgctagttgayggctagccca

SEQ ID NO: 11456 - DNA, 21 bp, Homo sapiens
agaacatgagytttttgtgaa

SEQ ID NO: 11457 - DNA, 21 bp, Homo sapiens
gagatgaatcmgatctgggtt

SEQ ID NO: 11458 - DNA, 21 bp, Homo sapiens
gtggcaaatcwctttaatcta

SEQ ID NO: 11459 - DNA, 21 bp, Homo sapiens
ccaagatgctractgctcagc

SEQ ID NO: 11460 - DNA, 21 bp, Homo sapiens
ccatactctcraggggcagca

SEQ ID NO: 11461 - DNA, 21 bp, Homo sapiens
tgcctaaatgyccaacagtag

SEQ ID NO: 11462 - DNA, 21 bp, Homo sapiens
cgagttcagtyaagtctgcaa

SEQ ID NO: 11463 - DNA, 21 bp, Homo sapiens
ctgaagccacrttggtccgca

SEQ ID NO: 11464 - DNA, 21 bp, Homo sapiens
ttgaacttggycctgtttttg

SEQ ID NO: 11465 - DNA, 21 bp, Homo sapiens
gtgagccaccrttggcatgag

SEQ ID NO: 11466 - DNA, 21 bp, Homo sapiens
gatcactgtgyagtcctatat

SEQ ID NO: 11467 - DNA, 21 bp, Homo sapiens
caaagcttacrggaactgctc

SEQ ID NO: 11468 - DNA, 21 bp, Homo sapiens
gatactttggsaagtcactaa

SEQ ID NO: 11469 - DNA, 21 bp, Homo sapiens
tgtggtttaaygtttgatgaa

SEQ ID NO: 11470 - DNA, 21 bp, Homo sapiens
actgatgcagyctctgctctt

SEQ ID NO: 11471 - DNA, 21 bp, Homo sapiens
taagcaggtaytttcaagtcc

SEQ ID NO: 11472 - DNA, 21 bp, Homo sapiens
taaatataaakcatccagcta

SEQ ID NO: 11473 - DNA, 21 bp, Homo sapiens
tctttggagcmccacattttc

SEQ ID NO: 11474 - DNA, 21 bp, Homo sapiens
tttccagagtmcatagtccag

SEQ ID NO: 11475 - DNA, 21 bp, Homo sapiens
gaaaagtcttsagaagcaaac

SEQ ID NO: 11476 - DNA, 21 bp, Homo sapiens
atggaagggcragttgttttt

SEQ ID NO: 11477 - DNA, 21 bp, Homo sapiens
gctctattccstccttttcta

SEQ ID NO: 11478 - DNA, 21 bp, Homo sapiens
catgtctgacrgcaggagatg

SEQ ID NO: 11479 - DNA, 21 bp, Homo sapiens
aggggcttcaraacatcctag

SEQ ID NO: 11480 - DNA, 21 bp, Homo sapiens
caaggcagtakttcccactgt

SEQ ID NO: 11481 - DNA, 21 bp, Homo sapiens
acacatctctracagcactta

SEQ ID NO: 11482 - DNA, 21 bp, Homo sapiens
ttataataacrctacaatttt

SEQ ID NO: 11483 - DNA, 21 bp, Homo sapiens
aaattcaaagragcagtctgg

SEQ ID NO: 11484 - DNA, 21 bp, Homo sapiens
tgtatccaatrtataaattct

SEQ ID NO: 11485 - DNA, 21 bp, Homo sapiens
cagatgatgaygtttcaaact

SEQ ID NO: 11486 - DNA, 21 bp, Homo sapiens
agagggagctsctgcaaagta

SEQ ID NO: 11487 - DNA, 21 bp, Homo sapiens
ctttgtaaaaygtttgtatgt

SEQ ID NO: 11488 - DNA, 21 bp, Homo sapiens
tatcctgcggrgtggtctagt

SEQ ID NO: 11489 - DNA, 21 bp, Homo sapiens
tttgtgaactygttgtgagga

SEQ ID NO: 11490 - DNA, 21 bp, Homo sapiens
ttgacattgcrccatggagtg

SEQ ID NO: 11491 - DNA, 21 bp, Homo sapiens
aacataactaygtcacggtgt

SEQ ID NO: 11492 - DNA, 21 bp, Homo sapiens
tcttatatttyaggaggctat

SEQ ID NO: 11493 - DNA, 21 bp, Homo sapiens
taggaaaaagkccatgggaac

SEQ ID NO: 11494 - DNA, 21 bp, Homo sapiens
agtctcacaayctttttataa

SEQ ID NO: 11495 - DNA, 21 bp, Homo sapiens
acttgcaagaraagcaggatt

SEQ ID NO: 11496 - DNA, 21 bp, Homo sapiens
gacgggaatgyaaaccctcat

SEQ ID NO: 11497 - DNA, 21 bp, Homo sapiens
gtttctttggrgcacacacaa

SEQ ID NO: 11498 - DNA, 21 bp, Homo sapiens
gtcatttgttktaggagaaat

SEQ ID NO: 11499 - DNA, 21 bp, Homo sapiens
gtggaagatayggcccatcct

SEQ ID NO: 11500 - DNA, 21 bp, Homo sapiens
tttgtttagtrgactgacaaa

SEQ ID NO: 11501 - DNA, 21 bp, Homo sapiens
acaactgtaaraaactcggcc

SEQ ID NO: 11502 - DNA, 21 bp, Homo sapiens
catgttttgartctactaaca

SEQ ID NO: 11503 - DNA, 21 bp, Homo sapiens
aagtgattttwtaaataccat

SEQ ID NO: 11504 - DNA, 21 bp, Homo sapiens
atggttctcargctgtagact

SEQ ID NO: 11505 - DNA, 21 bp, Homo sapiens
aatcgatatgstccaacagca

SEQ ID NO: 11506 - DNA, 21 bp, Homo sapiens
agacctgatcygcttggaaga

SEQ ID NO: 11507 - DNA, 21 bp, Homo sapiens
aggtttttctktgacgtttaa

SEQ ID NO: 11508 - DNA, 21 bp, Homo sapiens
ttttctgctayacctaacaca

SEQ ID NO: 11509 - DNA, 21 bp, Homo sapiens
atgctgctacmcagagtcaag

SEQ ID NO: 11510 - DNA, 21 bp, Homo sapiens
gtttgatgagractggttatc

SEQ ID NO: 11511 - DNA, 21 bp, Homo sapiens
gtctttaattktatgtcctcc

SEQ ID NO: 11512 - DNA, 21 bp, Homo sapiens
gaggatctagkttttaaaaat

SEQ ID NO: 11513 - DNA, 21 bp, Homo sapiens
agaatactgtyctccaccaac

SEQ ID NO: 11514 - DNA, 21 bp, Homo sapiens
ctctcctcatyggcatatacc

SEQ ID NO: 11515 - DNA, 21 bp, Homo sapiens
tatgtgtttaygatgcacagc

SEQ ID NO: 11516 - DNA, 21 bp, Homo sapiens
gtgaaaattaytaccgagccc

SEQ ID NO: 11517 - DNA, 21 bp, Homo sapiens
gtgttttaaaygtttggttct

SEQ ID NO: 11518 - DNA, 21 bp, Homo sapiens
cacacaaacaygcatactttt

SEQ ID NO: 11519 - DNA, 21 bp, Homo sapiens
aatcttttccytctgacactc

SEQ ID NO: 11520 - DNA, 21 bp, Homo sapiens
agagttactamagtgctagtc

SEQ ID NO: 11521 - DNA, 21 bp, Homo sapiens
ctggatgacaytgacctctgc

SEQ ID NO: 11522 - DNA, 21 bp, Homo sapiens
agatttgagayaggcttagga

SEQ ID NO: 11523 - DNA, 21 bp, Homo sapiens
agcaaattgtycaaagtcata

SEQ ID NO: 11524 - DNA, 21 bp, Homo sapiens
gttacttaatyattctccctt

SEQ ID NO: 11525 - DNA, 21 bp, Homo sapiens
gataacacagrtttagctatt

SEQ ID NO: 11526 - DNA, 21 bp, Homo sapiens
attgtttcttmctaaattttc

SEQ ID NO: 11527 - DNA, 21 bp, Homo sapiens
agctgtagacsttttgataag

SEQ ID NO: 11528 - DNA, 21 bp, Homo sapiens
atcctgccatragaatgttaa

SEQ ID NO: 11529 - DNA, 21 bp, Homo sapiens
ttttggtgctyatttataccc

SEQ ID NO: 11530 - DNA, 21 bp, Homo sapiens
ggcgaacaccraagtcctggc

SEQ ID NO: 11531 - DNA, 21 bp, Homo sapiens
tccagacactrggtaaagaga

SEQ ID NO: 11532 - DNA, 21 bp, Homo sapiens
tttggacccayacacaaattg

SEQ ID NO: 11533 - DNA, 21 bp, Homo sapiens
ataacttgagwgggataattt

SEQ ID NO: 11534 - DNA, 21 bp, Homo sapiens
ttgtaaccttrtcctagagac

SEQ ID NO: 11535 - DNA, 21 bp, Homo sapiens
ggtcgatttgsgttatgtaca

SEQ ID NO: 11536 - DNA, 21 bp, Homo sapiens
tgtttttactygtactaacct

SEQ ID NO: 11537 - DNA, 21 bp, Homo sapiens
atgaacaactrtttttaaagc

SEQ ID NO: 11538 - DNA, 21 bp, Homo sapiens
attaatagtartctttgctga

SEQ ID NO: 11539 - DNA, 21 bp, Homo sapiens
ttatgggacasttaaatgaag

SEQ ID NO: 11540 - DNA, 21 bp, Homo sapiens
cattttcaggktcctaacatg

SEQ ID NO: 11541 - DNA, 21 bp, Homo sapiens
attgaaaaacrttaagaaagg

SEQ ID NO: 11542 - DNA, 21 bp, Homo sapiens
agagggctgtragcatacatt

SEQ ID NO: 11543 - DNA, 21 bp, Homo sapiens
accaacgcaamgtgacagaat

SEQ ID NO: 11544 - DNA, 21 bp, Homo sapiens
aagttctagartaatttccaa

SEQ ID NO: 11545 - DNA, 21 bp, Homo sapiens
cttctcaaagscatctatgac

SEQ ID NO: 11546 - DNA, 21 bp, Homo sapiens
agtcctaatcmcttctcaaaa

SEQ ID NO: 11547 - DNA, 21 bp, Homo sapiens
aagctaagccygtgtccattc

SEQ ID NO: 11548 - DNA, 21 bp, Homo sapiens
atcatggaaaytggcattgta

SEQ ID NO: 11549 - DNA, 21 bp, Homo sapiens
atatctcattygtaactattt

SEQ ID NO: 11550 - DNA, 21 bp, Homo sapiens
gaacttcaggrtatgctagag

SEQ ID NO: 11551 - DNA, 21 bp, Homo sapiens
agcttattgcktgtgtacttg

SEQ ID NO: 11552 - DNA, 21 bp, Homo sapiens
tagtgactcarcatttgaggc

SEQ ID NO: 11553 - DNA, 21 bp, Homo sapiens
atgatctcttygattgctctt

SEQ ID NO: 11554 - DNA, 21 bp, Homo sapiens
ctttattaggrttttgcaagt

SEQ ID NO: 11555 - DNA, 21 bp, Homo sapiens
tccacactacrttcttaaatc

SEQ ID NO: 11556 - DNA, 21 bp, Homo sapiens
ctttggagtaycctccagctc

SEQ ID NO: 11557 - DNA, 21 bp, Homo sapiens
cacgtagcacratgttaatct

SEQ ID NO: 11558 - DNA, 21 bp, Homo sapiens
gaagagtcacrttctgtaaaa

SEQ ID NO: 11559 - DNA, 21 bp, Homo sapiens
tgtacagttayaggcttataa

SEQ ID NO: 11560 - DNA, 21 bp, Homo sapiens
gctggctttcytaactgcaat

SEQ ID NO: 11561 - DNA, 21 bp, Homo sapiens
catgttaaaaygtatagggta

SEQ ID NO: 11562 - DNA, 21 bp, Homo sapiens
atattatgtawacagaaattg

SEQ ID NO: 11563 - DNA, 21 bp, Homo sapiens
tacaatcttayaaaagttacc

SEQ ID NO: 11564 - DNA, 21 bp, Homo sapiens
ccttgtgagasattaaattta

SEQ ID NO: 11565 - DNA, 21 bp, Homo sapiens
atagtgtaatmcttaagggta

SEQ ID NO: 11566 - DNA, 21 bp, Homo sapiens
aggaaagaggrtatcatcttg

SEQ ID NO: 11567 - DNA, 21 bp, Homo sapiens
caaattatcaycacccccaat

SEQ ID NO: 11568 - DNA, 21 bp, Homo sapiens
tacataacctragaggatgaa

SEQ ID NO: 11569 - DNA, 21 bp, Homo sapiens
aatatagtcawgttaatcaca

SEQ ID NO: 11570 - DNA, 21 bp, Homo sapiens
tccaacttatraacagctaac

SEQ ID NO: 11571 - DNA, 21 bp, Homo sapiens
gcctcatggartgccaaatgt

SEQ ID NO: 11572 - DNA, 21 bp, Homo sapiens
agttttggtcktcttctatgt

SEQ ID NO: 11573 - DNA, 21 bp, Homo sapiens
tgctgccacgytgcaacctct

SEQ ID NO: 11574 - DNA, 21 bp, Homo sapiens
tattctacttyttattatttt

SEQ ID NO: 11575 - DNA, 21 bp, Homo sapiens
tgcaaacttayccgcagaaag

SEQ ID NO: 11576 - DNA, 21 bp, Homo sapiens
tagagttatcrtaaagctgga

SEQ ID NO: 11577 - DNA, 21 bp, Homo sapiens
tattatatacrtgcaaaaaaa

SEQ ID NO: 11578 - DNA, 21 bp, Homo sapiens
gttaaatcatrtaaaggtgcc

SEQ ID NO: 11579 - DNA, 21 bp, Homo sapiens
acattatcatktcccttgtaa

SEQ ID NO: 11580 - DNA, 21 bp, Homo sapiens
ctcttgccatyctacaatgct

SEQ ID NO: 11581 - DNA, 21 bp, Homo sapiens
agattgtctawagataaatgt

SEQ ID NO: 11582 - DNA, 21 bp, Homo sapiens
tacttgcatgsctgaaacttt

SEQ ID NO: 11583 - DNA, 21 bp, Homo sapiens
ggctgactcgygaaggcagaa

SEQ ID NO: 11584 - DNA, 21 bp, Homo sapiens
taatcgagaamcaactcaaat

SEQ ID NO: 11585 - DNA, 21 bp, Homo sapiens
ctcttgaggtwtccttaaaat

SEQ ID NO: 11586 - DNA, 21 bp, Homo sapiens
ccttgacactsagaattcatc

SEQ ID NO: 11587 - DNA, 21 bp, Homo sapiens
gaaggatcccrcctatcagct

SEQ ID NO: 11588 - DNA, 21 bp, Homo sapiens
tattaaagcastaaccctgtc

SEQ ID NO: 11589 - DNA, 21 bp, Homo sapiens
aagagccctaraagtgacact

SEQ ID NO: 11590 - DNA, 21 bp, Homo sapiens
tgacatctcasaggtgctctc

SEQ ID NO: 11591 - DNA, 21 bp, Homo sapiens
ctccatttggycagccttatt

SEQ ID NO: 11592 - DNA, 21 bp, Homo sapiens
ccttgttgctsagatactgtt

SEQ ID NO: 11593 - DNA, 21 bp, Homo sapiens
ttgatcctgaycttcagaacc

SEQ ID NO: 11594 - DNA, 21 bp, Homo sapiens
tggaatgttarttctagcctc

SEQ ID NO: 11595 - DNA, 21 bp, Homo sapiens
gatatgacagytatgtttgat

SEQ ID NO: 11596 - DNA, 21 bp, Homo sapiens
ttttatgtttrtatcaatcag

SEQ ID NO: 11597 - DNA, 21 bp, Homo sapiens
ttattttaatrcccacctaag

SEQ ID NO: 11598 - DNA, 21 bp, Homo sapiens
cttttccaagmagcacatcta

SEQ ID NO: 11599 - DNA, 21 bp, Homo sapiens
tgtagcacatkactatatgaa

SEQ ID NO: 11600 - DNA, 21 bp, Homo sapiens
ataactcatcrtctcagccag

SEQ ID NO: 11601 - DNA, 21 bp, Homo sapiens
aatgcccctcrctccgatctg

SEQ ID NO: 11602 - DNA, 21 bp, Homo sapiens
ggatatcgctrccatcgtcac

SEQ ID NO: 11603 - DNA, 21 bp, Homo sapiens
atttattttgwtaaagtgata

SEQ ID NO: 11604 - DNA, 21 bp, Homo sapiens
cctagcctttraagagttatc

SEQ ID NO: 11605 - DNA, 21 bp, Homo sapiens
actcatcatcstgagagccat

SEQ ID NO: 11606 - DNA, 21 bp, Homo sapiens
aacctctgtgrgaactcagct

SEQ ID NO: 11607 - DNA, 21 bp, Homo sapiens
agactaaaaaycttagcattg

SEQ ID NO: 11608 - DNA, 21 bp, Homo sapiens
caggcaagctrtcatgttaaa

SEQ ID NO: 11609 - DNA, 21 bp, Homo sapiens
attatattcaytacaaggcag

SEQ ID NO: 11610 - DNA, 21 bp, Homo sapiens
aaagagatcaygtaaatcaca

SEQ ID NO: 11611 - DNA, 21 bp, Homo sapiens
ggtagaaaacrtatttataat

SEQ ID NO: 11612 - DNA, 21 bp, Homo sapiens
ctataccaaasgaacaggaga

SEQ ID NO: 11613 - DNA, 21 bp, Homo sapiens
aggatggctasagaattaagt

SEQ ID NO: 11614 - DNA, 21 bp, Homo sapiens
atcaccattgwatcctcagca

SEQ ID NO: 11615 - DNA, 21 bp, Homo sapiens
taaaacaaaaygcacagacaa

SEQ ID NO: 11616 - DNA, 21 bp, Homo sapiens
aaacttttatyacactgagtg

SEQ ID NO: 11617 - DNA, 21 bp, Homo sapiens
tgaagaataarccatcattat

SEQ ID NO: 11618 - DNA, 21 bp, Homo sapiens
gttgagttccrtctaggattg

SEQ ID NO: 11619 - DNA, 21 bp, Homo sapiens
ttgcattttgygtagtattgt

SEQ ID NO: 11620 - DNA, 21 bp, Homo sapiens
atgtactgtayaatgacattt

SEQ ID NO: 11621 - DNA, 21 bp, Homo sapiens
ggttgcccacrccttgtttcc

SEQ ID NO: 11622 - DNA, 21 bp, Homo sapiens
ctgtagaataraatatttttg

SEQ ID NO: 11623 - DNA, 21 bp, Homo sapiens
gacaaccgcarcccaaagaat

SEQ ID NO: 11624 - DNA, 21 bp, Homo sapiens
caggtctcttstaagtcagag

SEQ ID NO: 11625 - DNA, 21 bp, Homo sapiens
cagagcgctayggaagcagtc

SEQ ID NO: 11626 - DNA, 21 bp, Homo sapiens
acccaggtaarcctgcagcta

SEQ ID NO: 11627 - DNA, 21 bp, Homo sapiens
gacgcagttcytcgtcaagaa

SEQ ID NO: 11628 - DNA, 21 bp, Homo sapiens
tgaattctgcytctgtctcac

SEQ ID NO: 11629 - DNA, 21 bp, Homo sapiens
cacataattartcatgcacta

SEQ ID NO: 11630 - DNA, 21 bp, Homo sapiens
gcctattgacrttagaggaaa

SEQ ID NO: 11631 - DNA, 21 bp, Homo sapiens
tatgtcttaaytgaaaagcca

SEQ ID NO: 11632 - DNA, 21 bp, Homo sapiens
tgcaacccagmaattttctgc

SEQ ID NO: 11633 - DNA, 21 bp, Homo sapiens
ctatattggtsctggactttc

SEQ ID NO: 11634 - DNA, 21 bp, Homo sapiens
gaagaaaacargtcccaaatg

SEQ ID NO: 11635 - DNA, 21 bp, Homo sapiens
ctcatgaatgytaagcatacg

SEQ ID NO: 11636 - DNA, 21 bp, Homo sapiens
gcaatccaaartctcaaaatc

SEQ ID NO: 11637 - DNA, 21 bp, Homo sapiens
agacacttttsattcaacggc

SEQ ID NO: 11638 - DNA, 21 bp, Homo sapiens
tgggagtgaamgcgagccgcc

SEQ ID NO: 11639 - DNA, 21 bp, Homo sapiens
atgagtaaaasaaaggatgca

SEQ ID NO: 11640 - DNA, 21 bp, Homo sapiens
aagatcagaayctgacccttt

SEQ ID NO: 11641 - DNA, 21 bp, Homo sapiens
accctcatacygtagactttg

SEQ ID NO: 11642 - DNA, 21 bp, Homo sapiens
tattattatcyagggacagtg

SEQ ID NO: 11643 - DNA, 21 bp, Homo sapiens
gatttctaatrgttgtacctg

SEQ ID NO: 11644 - DNA, 21 bp, Homo sapiens
ctggtatgtcsaggattacgt

SEQ ID NO: 11645 - DNA, 21 bp, Homo sapiens
aacagaatttytcacacatta

SEQ ID NO: 11646 - DNA, 21 bp, Homo sapiens
cactttattcrtctgatattt

SEQ ID NO: 11647 - DNA, 21 bp, Homo sapiens
taacaaaaaayggatactcga

SEQ ID NO: 11648 - DNA, 21 bp, Homo sapiens
gcagttccgcycgggacatcc

SEQ ID NO: 11649 - DNA, 21 bp, Homo sapiens
agctcagagaraacgtcgaaa

SEQ ID NO: 11650 - DNA, 21 bp, Homo sapiens
tcaagacatayctttttcacc

SEQ ID NO: 11651 - DNA, 21 bp, Homo sapiens
tgctatatacyatctcctagg

SEQ ID NO: 11652 - DNA, 21 bp, Homo sapiens
ggagatggggktgcccaaaga

SEQ ID NO: 11653 - DNA, 21 bp, Homo sapiens
gctcttttatyaccatgcttt

SEQ ID NO: 11654 - DNA, 21 bp, Homo sapiens
aagtaatgaayagtgtctaat

SEQ ID NO: 11655 - DNA, 21 bp, Homo sapiens
agaaaacatayttaattgcct

SEQ ID NO: 11656 - DNA, 21 bp, Homo sapiens
ccttggacgcyttgtctctct

SEQ ID NO: 11657 - DNA, 21 bp, Homo sapiens
taaattataartaaggtcaga

SEQ ID NO: 11658 - DNA, 21 bp, Homo sapiens
aaaatctgttsgccctggtca

SEQ ID NO: 11659 - DNA, 21 bp, Homo sapiens
tctgttgcctraaatgttgcc

SEQ ID NO: 11660 - DNA, 21 bp, Homo sapiens
attttcaatcyttacgacatt

SEQ ID NO: 11661 - DNA, 21 bp, Homo sapiens
atttctcaaamggtaatgatc

SEQ ID NO: 11662 - DNA, 21 bp, Homo sapiens
actaggcatcraggataatgt

SEQ ID NO: 11663 - DNA, 21 bp, Homo sapiens
ttatatacatrctcaattatc

SEQ ID NO: 11664 - DNA, 21 bp, Homo sapiens
aaatgtggctratacatacct

SEQ ID NO: 11665 - DNA, 21 bp, Homo sapiens
ttcagctagamagtacattga

SEQ ID NO: 11666 - DNA, 21 bp, Homo sapiens
gcaaaactatktaggaatatt

SEQ ID NO: 11667 - DNA, 21 bp, Homo sapiens
aaaataacttytagtaaacaa

SEQ ID NO: 11668 - DNA, 21 bp, Homo sapiens
gaatttatgcrgcaagcaatt

SEQ ID NO: 11669 - DNA, 21 bp, Homo sapiens
agtggtggtcstcttctaagt

SEQ ID NO: 11670 - DNA, 21 bp, Homo sapiens
ataagttatastgggagattt

SEQ ID NO: 11671 - DNA, 21 bp, Homo sapiens
cccagggcaakttgccttaca

SEQ ID NO: 11672 - DNA, 21 bp, Homo sapiens
taagggaaatycatgtcatca

SEQ ID NO: 11673 - DNA, 21 bp, Homo sapiens
ccttgcttcgyattatttatt

SEQ ID NO: 11674 - DNA, 21 bp, Homo sapiens
gcagatgaacrtgccaagatg

SEQ ID NO: 11675 - DNA, 21 bp, Homo sapiens
tggttcattamgagtaatctc

SEQ ID NO: 11676 - DNA, 21 bp, Homo sapiens
cacttcatgcwccttaaattg

SEQ ID NO: 11677 - DNA, 21 bp, Homo sapiens
aagcaatatartattttacaa

SEQ ID NO: 11678 - DNA, 21 bp, Homo sapiens
atatcaatacytcaagtaaac

SEQ ID NO: 11679 - DNA, 21 bp, Homo sapiens
gcattatactrtctctgtaag

SEQ ID NO: 11680 - DNA, 21 bp, Homo sapiens
catgagatacyggttataatt

SEQ ID NO: 11681 - DNA, 21 bp, Homo sapiens
gttgcccaccrgaagttgcag

SEQ ID NO: 11682 - DNA, 21 bp, Homo sapiens
ttactgacatyatgctaagct

SEQ ID NO: 11683 - DNA, 21 bp, Homo sapiens
tcatttgtaargctcctgtga

SEQ ID NO: 11684 - DNA, 21 bp, Homo sapiens
taccttagatrcagaaaacta

SEQ ID NO: 11685 - DNA, 21 bp, Homo sapiens
atttcagatawcaccatagct

SEQ ID NO: 11686 - DNA, 21 bp, Homo sapiens
tttccaatggytaaaggcttt

SEQ ID NO: 11687 - DNA, 21 bp, Homo sapiens
gtatcaagggygatccatgaa

SEQ ID NO: 11688 - DNA, 21 bp, Homo sapiens
cggggaagttwaaaaaagcag

SEQ ID NO: 11689 - DNA, 21 bp, Homo sapiens
tgacattaagrgcctctggct

SEQ ID NO: 11690 - DNA, 21 bp, Homo sapiens
tctgagatagygatcatccag

SEQ ID NO: 11691 - DNA, 21 bp, Homo sapiens
tgctcattgcrtcttacaaat

SEQ ID NO: 11692 - DNA, 21 bp, Homo sapiens
cacaacacttygagaacatgg

SEQ ID NO: 11693 - DNA, 21 bp, Homo sapiens
ggagacatgamaatactgagc

SEQ ID NO: 11694 - DNA, 21 bp, Homo sapiens
atctacacatkttggggtttt

SEQ ID NO: 11695 - DNA, 21 bp, Homo sapiens
ctcctaggcayttatttcaaa

SEQ ID NO: 11696 - DNA, 21 bp, Homo sapiens
taggtctgggmactttgcatc

SEQ ID NO: 11697 - DNA, 21 bp, Homo sapiens
tcaacagctargcatatgaca

SEQ ID NO: 11698 - DNA, 21 bp, Homo sapiens
gtggcaaccaytcaactctcc

SEQ ID NO: 11699 - DNA, 21 bp, Homo sapiens
tgtccttagaycattggagtc

SEQ ID NO: 11700 - DNA, 21 bp, Homo sapiens
tgtcctttgcwatgtagactc

SEQ ID NO: 11701 - DNA, 21 bp, Homo sapiens
tgagaaatctrtaattctaca

SEQ ID NO: 11702 - DNA, 21 bp, Homo sapiens
taaggcctggrtgccctgctg

SEQ ID NO: 11703 - DNA, 21 bp, Homo sapiens
cagaacccagsacctcgttat

SEQ ID NO: 11704 - DNA, 21 bp, Homo sapiens
agctctcatcragttttttta

SEQ ID NO: 11705 - DNA, 21 bp, Homo sapiens
aaggatttggyagaattggag

SEQ ID NO: 11706 - DNA, 21 bp, Homo sapiens
ttcagatcacrcttttagtag

SEQ ID NO: 11707 - DNA, 21 bp, Homo sapiens
tctgagacgaytgtaggttct

SEQ ID NO: 11708 - DNA, 21 bp, Homo sapiens
gacatttaacrgaaattttaa

SEQ ID NO: 11709 - DNA, 21 bp, Homo sapiens
aatgtcactawtatttctatc

SEQ ID NO: 11710 - DNA, 21 bp, Homo sapiens
tccaaacaagktatttattaa

SEQ ID NO: 11711 - DNA, 21 bp, Homo sapiens
gatgtaaacartgtggtgagt

SEQ ID NO: 11712 - DNA, 21 bp, Homo sapiens
atctcagcttrttttaagcac

SEQ ID NO: 11713 - DNA, 21 bp, Homo sapiens
acggtgactasaaagaatatt

SEQ ID NO: 11714 - DNA, 21 bp, Homo sapiens
aacagccattktatacaggct

SEQ ID NO: 11715 - DNA, 21 bp, Homo sapiens
ttactgagcayctaatatatt

SEQ ID NO: 11716 - DNA, 21 bp, Homo sapiens
atggtggaccytatgtgtact

SEQ ID NO: 11717 - DNA, 21 bp, Homo sapiens
aaagccacggyacctttgtag

SEQ ID NO: 11718 - DNA, 21 bp, Homo sapiens
cgcaagttggytggtttccaa

SEQ ID NO: 11719 - DNA, 21 bp, Homo sapiens
gagggcattcrggcattcggc

SEQ ID NO: 11720 - DNA, 21 bp, Homo sapiens
cgtctagatgkcaggaatcct

SEQ ID NO: 11721 - DNA, 21 bp, Homo sapiens
gctttgcatayactgtatttc

SEQ ID NO: 11722 - DNA, 21 bp, Homo sapiens
ctcttttgccrtataacataa

SEQ ID NO: 11723 - DNA, 21 bp, Homo sapiens
ctatttggagycataacagca

SEQ ID NO: 11724 - DNA, 21 bp, Homo sapiens
gcatttactgkagacaacatt

SEQ ID NO: 11725 - DNA, 21 bp, Homo sapiens
tgtctatcatsttactgaaat

SEQ ID NO: 11726 - DNA, 21 bp, Homo sapiens
gcaattgtgcycagtactctg

SEQ ID NO: 11727 - DNA, 21 bp, Homo sapiens
aatgtgagacrgttgtatgat

SEQ ID NO: 11728 - DNA, 21 bp, Homo sapiens
ggtctgtttcrgatggatcta

SEQ ID NO: 11729 - DNA, 21 bp, Homo sapiens
ccttcaatggyaagcatagta

SEQ ID NO: 11730 - DNA, 21 bp, Homo sapiens
accttcactgmtacttttact

SEQ ID NO: 11731 - DNA, 21 bp, Homo sapiens
gcaatattttktttcactctc

SEQ ID NO: 11732 - DNA, 21 bp, Homo sapiens
aactataactycatcattcct

SEQ ID NO: 11733 - DNA, 21 bp, Homo sapiens
taaaggcaccrgagcctgaaa

SEQ ID NO: 11734 - DNA, 21 bp, Homo sapiens
aaatcatcaamtcataagaaa

SEQ ID NO: 11735 - DNA, 21 bp, Homo sapiens
agggaatcaayggacagaagc

SEQ ID NO: 11736 - DNA, 21 bp, Homo sapiens
caggcaacctratgacaccat

SEQ ID NO: 11737 - DNA, 21 bp, Homo sapiens
ctaccccagastaaacttttc

SEQ ID NO: 11738 - DNA, 21 bp, Homo sapiens
aattttcaatrtatctcccaa

SEQ ID NO: 11739 - DNA, 21 bp, Homo sapiens
ggtactataakaaattctaca

SEQ ID NO: 11740 - DNA, 21 bp, Homo sapiens
tttgctcttcrgagaaatcta

SEQ ID NO: 11741 - DNA, 21 bp, Homo sapiens
aaattgcctayatcttaaaaa

SEQ ID NO: 11742 - DNA, 21 bp, Homo sapiens
atcaggttaayggaggatgct

SEQ ID NO: 11743 - DNA, 21 bp, Homo sapiens
atgaggtcttygtgttttcat

SEQ ID NO: 11744 - DNA, 21 bp, Homo sapiens
ttctgaacatrgcccaaattt

SEQ ID NO: 11745 - DNA, 21 bp, Homo sapiens
cctctggcagsacagaaaatg

SEQ ID NO: 11746 - DNA, 21 bp, Homo sapiens
ccttccatctygtaaatggca

SEQ ID NO: 11747 - DNA, 21 bp, Homo sapiens
gaaaagcagcrtgtagcatga

SEQ ID NO: 11748 - DNA, 21 bp, Homo sapiens
ttaaaaaaacwcacttatggc

SEQ ID NO: 11749 - DNA, 21 bp, Homo sapiens
gacacatcaayggcatttgac

SEQ ID NO: 11750 - DNA, 21 bp, Homo sapiens
ggttttgggcrtgcttggctc

SEQ ID NO: 11751 - DNA, 21 bp, Homo sapiens
gttgttcatgraaacaaggtt

SEQ ID NO: 11752 - DNA, 21 bp, Homo sapiens
catttttgctrtagatgtcct

SEQ ID NO: 11753 - DNA, 21 bp, Homo sapiens
gcatgcacaartgtgttttat

SEQ ID NO: 11754 - DNA, 21 bp, Homo sapiens
tccaagacttkctttgggaat

SEQ ID NO: 11755 - DNA, 21 bp, Homo sapiens
gagcacctccrtagagagctt

SEQ ID NO: 11756 - DNA, 21 bp, Homo sapiens
atcattggtgrcactgattac

SEQ ID NO: 11757 - DNA, 21 bp, Homo sapiens
ggtaagatagyattgattcag

SEQ ID NO: 11758 - DNA, 21 bp, Homo sapiens
gcatggcaccrccggccagac

SEQ ID NO: 11759 - DNA, 21 bp, Homo sapiens
ctagtctcatrgttgcgttct

SEQ ID NO: 11760 - DNA, 21 bp, Homo sapiens
attcgcaaatrtataattcta

SEQ ID NO: 11761 - DNA, 21 bp, Homo sapiens
ctgcagacgtytcccagattc

SEQ ID NO: 11762 - DNA, 21 bp, Homo sapiens
acctaactacwggttactgaa

SEQ ID NO: 11763 - DNA, 21 bp, Homo sapiens
tgtggagcttrttgcctcaag

SEQ ID NO: 11764 - DNA, 21 bp, Homo sapiens
aacaaaggatrtgtgagcagg

SEQ ID NO: 11765 - DNA, 21 bp, Homo sapiens
gttctaatttrccaaacctta

SEQ ID NO: 11766 - DNA, 21 bp, Homo sapiens
atgaaatagawcattcattcg

SEQ ID NO: 11767 - DNA, 21 bp, Homo sapiens
ttccgtcatgkgcaagacagc

SEQ ID NO: 11768 - DNA, 21 bp, Homo sapiens
ccttatgtaaygtaagtttcc

SEQ ID NO: 11769 - DNA, 21 bp, Homo sapiens
ggaacagaccygcactgctat

SEQ ID NO: 11770 - DNA, 21 bp, Homo sapiens
cctgtgaactscatgtggaag

SEQ ID NO: 11771 - DNA, 21 bp, Homo sapiens
acatctcccaygtacccagca

SEQ ID NO: 11772 - DNA, 21 bp, Homo sapiens
aaaatgttccytttgtggccc

SEQ ID NO: 11773 - DNA, 21 bp, Homo sapiens
cccatcagctraggattgtcc

SEQ ID NO: 11774 - DNA, 21 bp, Homo sapiens
ccagaaatctyctttgactca

SEQ ID NO: 11775 - DNA, 21 bp, Homo sapiens
ctcatttcctytgcatccaaa

SEQ ID NO: 11776 - DNA, 21 bp, Homo sapiens
aacagggtcastcaggttcct

SEQ ID NO: 11777 - DNA, 21 bp, Homo sapiens
cgaattaaaamagaaaatgta

SEQ ID NO: 11778 - DNA, 21 bp, Homo sapiens
gtgactcatcrtttttcaaat

SEQ ID NO: 11779 - DNA, 21 bp, Homo sapiens
aattttggaargcattggaat

SEQ ID NO: 11780 - DNA, 21 bp, Homo sapiens
ccttgtccaayggccgctagt

SEQ ID NO: 11781 - DNA, 21 bp, Homo sapiens
accactaaatyctcatgacaa

SEQ ID NO: 11782 - DNA, 21 bp, Homo sapiens
gtcatgctgaycgcttgctgg

SEQ ID NO: 11783 - DNA, 21 bp, Homo sapiens
ctcattcatcrggcaactttc

SEQ ID NO: 11784 - DNA, 21 bp, Homo sapiens
atgaggatttktacatgcatt

SEQ ID NO: 11785 - DNA, 21 bp, Homo sapiens
cagtgacttcmtaagttctag

SEQ ID NO: 11786 - DNA, 21 bp, Homo sapiens
cagctgccacrcttgcccaca

SEQ ID NO: 11787 - DNA, 21 bp, Homo sapiens
agccctaagcrgcatcatttg

SEQ ID NO: 11788 - DNA, 21 bp, Homo sapiens
tctagagctayttcactatga

SEQ ID NO: 11789 - DNA, 21 bp, Homo sapiens
ccatataagcrtatcattttt

SEQ ID NO: 11790 - DNA, 21 bp, Homo sapiens
gaaaccttttyggcgaggtag

SEQ ID NO: 11791 - DNA, 21 bp, Homo sapiens
ttaagttacaygctgattaca

SEQ ID NO: 11792 - DNA, 21 bp, Homo sapiens
gtattctatcygttttacaat

SEQ ID NO: 11793 - DNA, 21 bp, Homo sapiens
atgagcttagyatcagcaaac

SEQ ID NO: 11794 - DNA, 21 bp, Homo sapiens
caattatttcraaattcatct

SEQ ID NO: 11795 - DNA, 21 bp, Homo sapiens
gcatccttggktgctttccta

SEQ ID NO: 11796 - DNA, 21 bp, Homo sapiens
ccaaatagtcrtatgaaaatt

SEQ ID NO: 11797 - DNA, 21 bp, Homo sapiens
tattttgtccrtagaactcta

SEQ ID NO: 11798 - DNA, 21 bp, Homo sapiens
gactaagaaargaggaatttg

SEQ ID NO: 11799 - DNA, 21 bp, Homo sapiens
taatccactgycttccacctc

SEQ ID NO: 11800 - DNA, 21 bp, Homo sapiens
tatcctgaggstgctgaagct

SEQ ID NO: 11801 - DNA, 21 bp, Homo sapiens
tcttcaaaccraaagcagaat

SEQ ID NO: 11802 - DNA, 21 bp, Homo sapiens
gaaccgaaagwgctatcattt

SEQ ID NO: 11803 - DNA, 21 bp, Homo sapiens
ctgtcatgctygtggttcaac

SEQ ID NO: 11804 - DNA, 21 bp, Homo sapiens
atgaatcccastatttcagga

SEQ ID NO: 11805 - DNA, 21 bp, Homo sapiens
actctgatccrttttcccctg

SEQ ID NO: 11806 - DNA, 21 bp, Homo sapiens
ccgtggatagytactgtctca

SEQ ID NO: 11807 - DNA, 21 bp, Homo sapiens
atggttatgcygtgtagtggc

SEQ ID NO: 11808 - DNA, 21 bp, Homo sapiens
tatagtataarcacttgatgg

SEQ ID NO: 11809 - DNA, 21 bp, Homo sapiens
aaagtcaccaycatgacctac

SEQ ID NO: 11810 - DNA, 21 bp, Homo sapiens
gggtccctaaygtaacactga

SEQ ID NO: 11811 - DNA, 21 bp, Homo sapiens
aaactcacaasagattgactt

SEQ ID NO: 11812 - DNA, 21 bp, Homo sapiens
agatgatctckttgacacaaa

SEQ ID NO: 11813 - DNA, 21 bp, Homo sapiens
ttagcgcttakgttagttcaa

SEQ ID NO: 11814 - DNA, 21 bp, Homo sapiens
tggtaaagcawttgctaatca

SEQ ID NO: 11815 - DNA, 21 bp, Homo sapiens
tgaactttaamaaaacctcca

SEQ ID NO: 11816 - DNA, 21 bp, Homo sapiens
ccatttcttayatgcatctgt

SEQ ID NO: 11817 - DNA, 21 bp, Homo sapiens
cttgcagttaygttggatcca

SEQ ID NO: 11818 - DNA, 21 bp, Homo sapiens
agctcttctcygattggctgg

SEQ ID NO: 11819 - DNA, 21 bp, Homo sapiens
tgcctcatttsacaaatagta

SEQ ID NO: 11820 - DNA, 21 bp, Homo sapiens
tatctacattyttgtcttgat

SEQ ID NO: 11821 - DNA, 21 bp, Homo sapiens
tgcctttaaarttaagcatct

SEQ ID NO: 11822 - DNA, 21 bp, Homo sapiens
tggatgatgaygtgttatttg

SEQ ID NO: 11823 - DNA, 21 bp, Homo sapiens
cccattacacmtgaaaaataa

SEQ ID NO: 11824 - DNA, 21 bp, Homo sapiens
cttattggacsttctcttttc

SEQ ID NO: 11825 - DNA, 21 bp, Homo sapiens
gagtgtacacyccgtgtgtgg

SEQ ID NO: 11826 - DNA, 21 bp, Homo sapiens
ggtgtacatcscctgcgatat

SEQ ID NO: 11827 - DNA, 21 bp, Homo sapiens
atctttaaaasttttatgaag

SEQ ID NO: 11828 - DNA, 21 bp, Homo sapiens
caggtaaagtrttttatatgt

SEQ ID NO: 11829 - DNA, 21 bp, Homo sapiens
ttgctaatccycaaaaaacga

SEQ ID NO: 11830 - DNA, 21 bp, Homo sapiens
tgctttctccycagacagtca

SEQ ID NO: 11831 - DNA, 21 bp, Homo sapiens
ggacaaaaaawttgaacagat

SEQ ID NO: 11832 - DNA, 21 bp, Homo sapiens
ggaagctccgygtaaaacaaa

SEQ ID NO: 11833 - DNA, 21 bp, Homo sapiens
catgaaatagygttgctcaac

SEQ ID NO: 11834 - DNA, 21 bp, Homo sapiens
atgttgtcagkaataatgttt

SEQ ID NO: 11835 - DNA, 21 bp, Homo sapiens
gcatattatawacaatattac

SEQ ID NO: 11836 - DNA, 21 bp, Homo sapiens
acattgtttgytgtcttccag

SEQ ID NO: 11837 - DNA, 21 bp, Homo sapiens
aaacttatacrgtggcataga

SEQ ID NO: 11838 - DNA, 21 bp, Homo sapiens
cttgctatccmaagaaaacaa

SEQ ID NO: 11839 - DNA, 21 bp, Homo sapiens
attccaagackaaacttctag

SEQ ID NO: 11840 - DNA, 21 bp, Homo sapiens
gacagtgctaratccaattta

SEQ ID NO: 11841 - DNA, 21 bp, Homo sapiens
atcaattataygtgaatatat

SEQ ID NO: 11842 - DNA, 21 bp, Homo sapiens
attcaggatartttctccatc

SEQ ID NO: 11843 - DNA, 21 bp, Homo sapiens
caccagtaatmaccagtatac

SEQ ID NO: 11844 - DNA, 21 bp, Homo sapiens
ctgagtgatgygtgcgttcaa

SEQ ID NO: 11845 - DNA, 21 bp, Homo sapiens
gtttacaaacygttgaaacaa

SEQ ID NO: 11846 - DNA, 21 bp, Homo sapiens
aaaacacaaakgtaattagct

SEQ ID NO: 11847 - DNA, 21 bp, Homo sapiens
ctgtgaatgcyaaaattattt

SEQ ID NO: 11848 - DNA, 21 bp, Homo sapiens
gagaaacatcracacttggca

SEQ ID NO: 11849 - DNA, 21 bp, Homo sapiens
tgttcagggcrtagattaagt

SEQ ID NO: 11850 - DNA, 21 bp, Homo sapiens
cattccatctstgtcataagt

SEQ ID NO: 11851 - DNA, 21 bp, Homo sapiens
ccatgtcttayatggcagcag

SEQ ID NO: 11852 - DNA, 21 bp, Homo sapiens
attttctttgytccttcagta

SEQ ID NO: 11853 - DNA, 21 bp, Homo sapiens
cataagttgaytctgacaaaa

SEQ ID NO: 11854 - DNA, 21 bp, Homo sapiens
agataaaacamatagaccatc

SEQ ID NO: 11855 - DNA, 21 bp, Homo sapiens
aaaagctttckgagaagctgc

SEQ ID NO: 11856 - DNA, 21 bp, Homo sapiens
aaagtagaaasaagccctctg

SEQ ID NO: 11857 - DNA, 21 bp, Homo sapiens
ttctcccaacmtgtccccatt

SEQ ID NO: 11858 - DNA, 21 bp, Homo sapiens
taaaatattcmttatctggct

SEQ ID NO: 11859 - DNA, 21 bp, Homo sapiens
aataacttctrcaaatataag

SEQ ID NO: 11860 - DNA, 21 bp, Homo sapiens
atcttttgccmcataacttaa

SEQ ID NO: 11861 - DNA, 21 bp, Homo sapiens
aaatgggaacycagtgtctca

SEQ ID NO: 11862 - DNA, 21 bp, Homo sapiens
gaaccactggwttgaattgca

SEQ ID NO: 11863 - DNA, 21 bp, Homo sapiens
aagtttgtcaygcaatctcgg

SEQ ID NO: 11864 - DNA, 21 bp, Homo sapiens
aatctggtctrtagatgaacc

SEQ ID NO: 11865 - DNA, 21 bp, Homo sapiens
taggattgatktttttttttg

SEQ ID NO: 11866 - DNA, 21 bp, Homo sapiens
agagtaataartatttatgaa

SEQ ID NO: 11867 - DNA, 21 bp, Homo sapiens
gattttcagayatggatatta

SEQ ID NO: 11868 - DNA, 21 bp, Homo sapiens
ttattcctaaygatgcttgat

SEQ ID NO: 11869 - DNA, 21 bp, Homo sapiens
cagatttaaaygtaagtgttt

SEQ ID NO: 11870 - DNA, 21 bp, Homo sapiens
ctgagaggctsgaatgggact

SEQ ID NO: 11871 - DNA, 21 bp, Homo sapiens
ttctgatcgamttctttattt

SEQ ID NO: 11872 - DNA, 21 bp, Homo sapiens
cagggacatgsctctcagctt

SEQ ID NO: 11873 - DNA, 21 bp, Homo sapiens
ttcctctaacsaataggcagt

SEQ ID NO: 11874 - DNA, 21 bp, Homo sapiens
agaaaataaaytgagttgcta

SEQ ID NO: 11875 - DNA, 21 bp, Homo sapiens
aagtgatatasagatttggtg

SEQ ID NO: 11876 - DNA, 21 bp, Homo sapiens
aaaacccctayataaccttag

SEQ ID NO: 11877 - DNA, 21 bp, Homo sapiens
aatccacaacwctaactgagc

SEQ ID NO: 11878 - DNA, 21 bp, Homo sapiens
cataaagggaygtgtgtgaac

SEQ ID NO: 11879 - DNA, 21 bp, Homo sapiens
ttggccatggytgactttggt

SEQ ID NO: 11880 - DNA, 21 bp, Homo sapiens
cattgcctacstggctactag

SEQ ID NO: 11881 - DNA, 21 bp, Homo sapiens
ttcatttgttyttcaggaatc

SEQ ID NO: 11882 - DNA, 21 bp, Homo sapiens
cttaattaggragatcagagt

SEQ ID NO: 11883 - DNA, 21 bp, Homo sapiens
tgaatcttccktaaagggatg

SEQ ID NO: 11884 - DNA, 21 bp, Homo sapiens
atacattacartgaaaagcta

SEQ ID NO: 11885 - DNA, 21 bp, Homo sapiens
ttctaattackgacagacatg

SEQ ID NO: 11886 - DNA, 21 bp, Homo sapiens
ttgtagaattrctgttaatgg

SEQ ID NO: 11887 - DNA, 21 bp, Homo sapiens
ttcaacactgyttttacttag

SEQ ID NO: 11888 - DNA, 21 bp, Homo sapiens
cacttaaatgycacaatattc

SEQ ID NO: 11889 - DNA, 21 bp, Homo sapiens
aaaactattgwttcctcaaat

SEQ ID NO: 11890 - DNA, 21 bp, Homo sapiens
aatgaagatayggctttttgt

SEQ ID NO: 11891 - DNA, 21 bp, Homo sapiens
gcttgtaaaamagaagcctga

SEQ ID NO: 11892 - DNA, 21 bp, Homo sapiens
ttcttcttccwtgagaagtgc

SEQ ID NO: 11893 - DNA, 21 bp, Homo sapiens
aggatccaccrtgtaagctag

SEQ ID NO: 11894 - DNA, 21 bp, Homo sapiens
gaaaacttackattgtcatga

SEQ ID NO: 11895 - DNA, 21 bp, Homo sapiens
cttagacccartcagaatggc

SEQ ID NO: 11896 - DNA, 21 bp, Homo sapiens
tacgatctagrctaggcactt

SEQ ID NO: 11897 - DNA, 21 bp, Homo sapiens
taaagtaaccrtcttagaatt

SEQ ID NO: 11898 - DNA, 21 bp, Homo sapiens
ttcaaaaatawggctactgca

SEQ ID NO: 11899 - DNA, 21 bp, Homo sapiens
tgcattttctrtttattaact

SEQ ID NO: 11900 - DNA, 21 bp, Homo sapiens
tcaggttctgrtaagaattgt

SEQ ID NO: 11901 - DNA, 21 bp, Homo sapiens
taccttaaacytcaaaaatga

SEQ ID NO: 11902 - DNA, 21 bp, Homo sapiens
tataagcatgkattcaggaaa

SEQ ID NO: 11903 - DNA, 21 bp, Homo sapiens
ctggattccgrcaggcctgta

SEQ ID NO: 11904 - DNA, 21 bp, Homo sapiens
ttacagtcaarggcagaaaac

SEQ ID NO: 11905 - DNA, 21 bp, Homo sapiens
tgttaggaaayggaattagga

SEQ ID NO: 11906 - DNA, 21 bp, Homo sapiens
tagtagcaagsaaggaaagct

SEQ ID NO: 11907 - DNA, 21 bp, Homo sapiens
atcctctttawttgactacca

SEQ ID NO: 11908 - DNA, 21 bp, Homo sapiens
ttttatgttcrtggctattaa

SEQ ID NO: 11909 - DNA, 21 bp, Homo sapiens
agtggtaacartcacagattc

SEQ ID NO: 11910 - DNA, 21 bp, Homo sapiens
gaaatttcccygtcagctaat

SEQ ID NO: 11911 - DNA, 21 bp, Homo sapiens
ctgggagccarcagttctctg

SEQ ID NO: 11912 - DNA, 21 bp, Homo sapiens
attcacagccstggactcctc

SEQ ID NO: 11913 - DNA, 21 bp, Homo sapiens
tgcccttggtrtgaggaaagc

SEQ ID NO: 11914 - DNA, 21 bp, Homo sapiens
cagtgagtttytatctttaaa

SEQ ID NO: 11915 - DNA, 21 bp, Homo sapiens
tggtccttatygagagaaggg

SEQ ID NO: 11916 - DNA, 21 bp, Homo sapiens
aaatgacactrggcttattct

SEQ ID NO: 11917 - DNA, 21 bp, Homo sapiens
gctcttctttscttcagatct

SEQ ID NO: 11918 - DNA, 21 bp, Homo sapiens
gctagaaccgytcatggattt

SEQ ID NO: 11919 - DNA, 21 bp, Homo sapiens
tagggccctcygcagaaatgc

SEQ ID NO: 11920 - DNA, 21 bp, Homo sapiens
aaaaatgtctyttatggtgag

SEQ ID NO: 11921 - DNA, 21 bp, Homo sapiens
gaaatgagtaygtttagtgag

SEQ ID NO: 11922 - DNA, 21 bp, Homo sapiens
atgggtgcctkcctcacctgc

SEQ ID NO: 11923 - DNA, 21 bp, Homo sapiens
gtcactagacstaggtgtttt

SEQ ID NO: 11924 - DNA, 21 bp, Homo sapiens
cctggaaaatrgcattcagta

SEQ ID NO: 11925 - DNA, 21 bp, Homo sapiens
gttttaaatakaataagcact

SEQ ID NO: 11926 - DNA, 21 bp, Homo sapiens
catgcccttcrgtcagatacg

SEQ ID NO: 11927 - DNA, 21 bp, Homo sapiens
agaaagtaacyagcacaatct

SEQ ID NO: 11928 - DNA, 21 bp, Homo sapiens
tatatatttaygttgtaagct

SEQ ID NO: 11929 - DNA, 21 bp, Homo sapiens
caggacccttytgttatcatc

SEQ ID NO: 11930 - DNA, 21 bp, Homo sapiens
gaattagcatyaagattttta

SEQ ID NO: 11931 - DNA, 21 bp, Homo sapiens
acagccacgtkaaacccacag

SEQ ID NO: 11932 - DNA, 21 bp, Homo sapiens
ctttagagaaygtttagattt

SEQ ID NO: 11933 - DNA, 21 bp, Homo sapiens
attgtttccasaaaagtttct

SEQ ID NO: 11934 - DNA, 21 bp, Homo sapiens
agatgaatatkttaagagatg

SEQ ID NO: 11935 - DNA, 21 bp, Homo sapiens
aaaatggccaraaaaatctat

SEQ ID NO: 11936 - DNA, 21 bp, Homo sapiens
tgggtgaatgycacacactat

SEQ ID NO: 11937 - DNA, 21 bp, Homo sapiens
taaaacacttmattacacact

SEQ ID NO: 11938 - DNA, 21 bp, Homo sapiens
tcacttcaacygttaaggacc

SEQ ID NO: 11939 - DNA, 21 bp, Homo sapiens
tcacagtgtgrtcctggcctg

SEQ ID NO: 11940 - DNA, 21 bp, Homo sapiens
tcacataagcraaaggtacta

SEQ ID NO: 11941 - DNA, 21 bp, Homo sapiens
gtttaacagtkatgacaaatt

SEQ ID NO: 11942 - DNA, 21 bp, Homo sapiens
tcttacttcarttatacaatc

SEQ ID NO: 11943 - DNA, 21 bp, Homo sapiens
cagaatgagawcagctgctac

SEQ ID NO: 11944 - DNA, 21 bp, Homo sapiens
gacactgagayagaaattaga

SEQ ID NO: 11945 - DNA, 21 bp, Homo sapiens
attggaggaaytgacaaaggt

SEQ ID NO: 11946 - DNA, 21 bp, Homo sapiens
aggaaacaagyagagatttta

SEQ ID NO: 11947 - DNA, 21 bp, Homo sapiens
cttcactgaastaatttctca

SEQ ID NO: 11948 - DNA, 21 bp, Homo sapiens
gaaaaaaatgycttttaataa

SEQ ID NO: 11949 - DNA, 21 bp, Homo sapiens
caaaaagtaakgagctatttc

SEQ ID NO: 11950 - DNA, 21 bp, Homo sapiens
aaattctcagrtatgttctta

SEQ ID NO: 11951 - DNA, 21 bp, Homo sapiens
taaacccaagrtccaactacc

SEQ ID NO: 11952 - DNA, 21 bp, Homo sapiens
tgtgaggcctmtgttcacagc

SEQ ID NO: 11953 - DNA, 21 bp, Homo sapiens
cccattctccrcatgtctacc

SEQ ID NO: 11954 - DNA, 21 bp, Homo sapiens
accaagcacaygacgtctatg

SEQ ID NO: 11955 - DNA, 21 bp, Homo sapiens
tagatggagawttcttcatga

SEQ ID NO: 11956 - DNA, 21 bp, Homo sapiens
cctggagcctmcacacacacg

SEQ ID NO: 11957 - DNA, 21 bp, Homo sapiens
tttacagagargagatggatt

SEQ ID NO: 11958 - DNA, 21 bp, Homo sapiens
tgactgaagaycagatgaaat

SEQ ID NO: 11959 - DNA, 21 bp, Homo sapiens
aatatcctacycttgaaagag

SEQ ID NO: 11960 - DNA, 21 bp, Homo sapiens
gtaccatccaygtgcttgcct

SEQ ID NO: 11961 - DNA, 21 bp, Homo sapiens
actatgtgccygtgataacgt

SEQ ID NO: 11962 - DNA, 21 bp, Homo sapiens
tgtggcatttktcagaccatc

SEQ ID NO: 11963 - DNA, 21 bp, Homo sapiens
cacttcttctktgctctcatt

SEQ ID NO: 11964 - DNA, 21 bp, Homo sapiens
atggccagaayactttttaag

SEQ ID NO: 11965 - DNA, 21 bp, Homo sapiens
gccagtcatgmactcccttac

SEQ ID NO: 11966 - DNA, 21 bp, Homo sapiens
tagacggaaakctctcagtca

SEQ ID NO: 11967 - DNA, 21 bp, Homo sapiens
gatcaaacagygagcgacatc

SEQ ID NO: 11968 - DNA, 21 bp, Homo sapiens
ttttctagttycaagtatatt

SEQ ID NO: 11969 - DNA, 21 bp, Homo sapiens
ggttccaaaayctattgacca

SEQ ID NO: 11970 - DNA, 21 bp, Homo sapiens
cctgtgttcayatcgcatgct

SEQ ID NO: 11971 - DNA, 21 bp, Homo sapiens
gttaatgaaayagaatgctaa

SEQ ID NO: 11972 - DNA, 21 bp, Homo sapiens
gatcagatacrttgtcctaaa

SEQ ID NO: 11973 - DNA, 21 bp, Homo sapiens
aacgttgagayagatgtcata

SEQ ID NO: 11974 - DNA, 21 bp, Homo sapiens
actcgatggargtccgacccc

SEQ ID NO: 11975 - DNA, 21 bp, Homo sapiens
tctatgaattygataaggtca

SEQ ID NO: 11976 - DNA, 21 bp, Homo sapiens
tgtagcactgmagttaaggtt

SEQ ID NO: 11977 - DNA, 21 bp, Homo sapiens
acaatctggcrtttaccacac

SEQ ID NO: 11978 - DNA, 21 bp, Homo sapiens
aatcaaaaggyatcactggaa

SEQ ID NO: 11979 - DNA, 21 bp, Homo sapiens
ccgagtgtacrttataaaaat

SEQ ID NO: 11980 - DNA, 21 bp, Homo sapiens
tcattgttttscaagaaatga

SEQ ID NO: 11981 - DNA, 21 bp, Homo sapiens
gaacaagtgawttaaagcttc

SEQ ID NO: 11982 - DNA, 21 bp, Homo sapiens
gatgtagatgyataactttaa

SEQ ID NO: 11983 - DNA, 21 bp, Homo sapiens
ctctaccatasatcatctgta

SEQ ID NO: 11984 - DNA, 21 bp, Homo sapiens
tcactgaacarcagaataatt

SEQ ID NO: 11985 - DNA, 21 bp, Homo sapiens
ccttgagttasatgttcatgg

SEQ ID NO: 11986 - DNA, 21 bp, Homo sapiens
ggttaaaaccrtggttgggta

SEQ ID NO: 11987 - DNA, 21 bp, Homo sapiens
aaaaaatatayaaacagttga

SEQ ID NO: 11988 - DNA, 21 bp, Homo sapiens
tgcaactgtasagtcttgcaa

SEQ ID NO: 11989 - DNA, 21 bp, Homo sapiens
ccatgggtctrgatcagattc

SEQ ID NO: 11990 - DNA, 21 bp, Homo sapiens
taatgattcaraaaactggaa

SEQ ID NO: 11991 - DNA, 21 bp, Homo sapiens
gaatttaagayacatatatat

SEQ ID NO: 11992 - DNA, 21 bp, Homo sapiens
aaactatagcyggaattacga

SEQ ID NO: 11993 - DNA, 21 bp, Homo sapiens
tgcacacaaamgatggagagg

SEQ ID NO: 11994 - DNA, 21 bp, Homo sapiens
cattcatttgktaattaaaat

SEQ ID NO: 11995 - DNA, 21 bp, Homo sapiens
aattgtttaaygactactcca

SEQ ID NO: 11996 - DNA, 21 bp, Homo sapiens
gtggcatctcyatacccacat

SEQ ID NO: 11997 - DNA, 21 bp, Homo sapiens
cttttactccyttatctccca

SEQ ID NO: 11998 - DNA, 21 bp, Homo sapiens
ttgacaaaaaytgcctggaaa

SEQ ID NO: 11999 - DNA, 21 bp, Homo sapiens
gtccaatttcraaattaaaat

SEQ ID NO: 12000 - DNA, 21 bp, Homo sapiens
ttcttgcattwgcatcagtaa

SEQ ID NO: 12001 - DNA, 21 bp, Homo sapiens
gtttaagatawtcaaaccata

SEQ ID NO: 12002 - DNA, 21 bp, Homo sapiens
tacatgagatmtgaagctcag

SEQ ID NO: 12003 - DNA, 21 bp, Homo sapiens
aaatcaagtgytatgtttggg

SEQ ID NO: 12004 - DNA, 21 bp, Homo sapiens
aaaagttaacytgtctgcaaa

SEQ ID NO: 12005 - DNA, 21 bp, Homo sapiens
gtttaggacaracaaggataa

SEQ ID NO: 12006 - DNA, 21 bp, Homo sapiens
tttgcaagctyaatgtgaata

SEQ ID NO: 12007 - DNA, 21 bp, Homo sapiens
aggtattcagyggttggaaga

SEQ ID NO: 12008 - DNA, 21 bp, Homo sapiens
gataggagtayattcaaaaag

SEQ ID NO: 12009 - DNA, 21 bp, Homo sapiens
gaacgtatatrcaggcctgct

SEQ ID NO: 12010 - DNA, 21 bp, Homo sapiens
gcacctttagyaataccttgc

SEQ ID NO: 12011 - DNA, 21 bp, Homo sapiens
ttggattctcyatacttcatt

SEQ ID NO: 12012 - DNA, 21 bp, Homo sapiens
cttgccaaacstcatgcccta

SEQ ID NO: 12013 - DNA, 21 bp, Homo sapiens
ttaacaccagrtaaggacaag

SEQ ID NO: 12014 - DNA, 21 bp, Homo sapiens
cagtacatatscaggaaaatt

SEQ ID NO: 12015 - DNA, 21 bp, Homo sapiens
tctttgttcaraagtttataa

SEQ ID NO: 12016 - DNA, 21 bp, Homo sapiens
tgtctgggctrcacaggtcta

SEQ ID NO: 12017 - DNA, 21 bp, Homo sapiens
gagccatgtarctgagaccgg

SEQ ID NO: 12018 - DNA, 21 bp, Homo sapiens
tgaagaaacaraaaagttaaa

SEQ ID NO: 12019 - DNA, 21 bp, Homo sapiens
cagatctggargttccactga

SEQ ID NO: 12020 - DNA, 21 bp, Homo sapiens
aaatacagctrccattcacta

SEQ ID NO: 12021 - DNA, 21 bp, Homo sapiens
aggccctgaaygtagtttttg

SEQ ID NO: 12022 - DNA, 21 bp, Homo sapiens
gaactgcagakaggaagtgtg

SEQ ID NO: 12023 - DNA, 21 bp, Homo sapiens
gaaaaaaactwcatacaagat

SEQ ID NO: 12024 - DNA, 21 bp, Homo sapiens
aatatatatcrccacattaaa

SEQ ID NO: 12025 - DNA, 21 bp, Homo sapiens
ctatataaacytgcagtatca

SEQ ID NO: 12026 - DNA, 21 bp, Homo sapiens
tgctgaaggcrctatgcagac

SEQ ID NO: 12027 - DNA, 21 bp, Homo sapiens
aaaatatgacwgagattggaa

SEQ ID NO: 12028 - DNA, 21 bp, Homo sapiens
tactatgctastgagattttg

SEQ ID NO: 12029 - DNA, 21 bp, Homo sapiens
catgtttttaytctcttaatg

SEQ ID NO: 12030 - DNA, 21 bp, Homo sapiens
ttctgacttgmacattttatg

SEQ ID NO: 12031 - DNA, 21 bp, Homo sapiens
aaatccgatarcatgtcacat

SEQ ID NO: 12032 - DNA, 21 bp, Homo sapiens
tcagattttayggttgttgga

SEQ ID NO: 12033 - DNA, 21 bp, Homo sapiens
ccacaattttwaagtgtcagg

SEQ ID NO: 12034 - DNA, 21 bp, Homo sapiens
tcacttgctasatataaagtg

SEQ ID NO: 12035 - DNA, 21 bp, Homo sapiens
tgttctcattkaactcttaca

SEQ ID NO: 12036 - DNA, 21 bp, Homo sapiens
ttttctttcaytgtgagcttt

SEQ ID NO: 12037 - DNA, 21 bp, Homo sapiens
acaaggtcacstaaatgctca

SEQ ID NO: 12038 - DNA, 21 bp, Homo sapiens
tttactatggstgcctcaaac

SEQ ID NO: 12039 - DNA, 21 bp, Homo sapiens
gtgcagcagtratttgtataa

SEQ ID NO: 12040 - DNA, 21 bp, Homo sapiens
gggtaatcatrtacgaagaca

SEQ ID NO: 12041 - DNA, 21 bp, Homo sapiens
ttgtgagtgartatctagaca

SEQ ID NO: 12042 - DNA, 21 bp, Homo sapiens
gaacacaagakacaggtttga

SEQ ID NO: 12043 - DNA, 21 bp, Homo sapiens
aataactacartgatttctct

SEQ ID NO: 12044 - DNA, 21 bp, Homo sapiens
taaaatcacartcaagtgata

SEQ ID NO: 12045 - DNA, 21 bp, Homo sapiens
tttgtggactsatgagatgac

SEQ ID NO: 12046 - DNA, 21 bp, Homo sapiens
attttgttgtrgtaaagaaaa

SEQ ID NO: 12047 - DNA, 21 bp, Homo sapiens
gaaggtatgtrtaaaccagaa

SEQ ID NO: 12048 - DNA, 21 bp, Homo sapiens
gtcattcgcakcaaattcagc

SEQ ID NO: 12049 - DNA, 21 bp, Homo sapiens
gagcttgtgaragaaggaaga

SEQ ID NO: 12050 - DNA, 21 bp, Homo sapiens
ggccaacccaytcttctggaa

SEQ ID NO: 12051 - DNA, 21 bp, Homo sapiens
tctgactcacrtgctaatatt

SEQ ID NO: 12052 - DNA, 21 bp, Homo sapiens
tccctgaatgyggtttccaca

SEQ ID NO: 12053 - DNA, 21 bp, Homo sapiens
aactcttccaratacaaagag

SEQ ID NO: 12054 - DNA, 21 bp, Homo sapiens
agatgtgagasagaattgcta

SEQ ID NO: 12055 - DNA, 21 bp, Homo sapiens
agtgtatctgyggttaggtta

SEQ ID NO: 12056 - DNA, 21 bp, Homo sapiens
atagtgaataycttatcagct

SEQ ID NO: 12057 - DNA, 21 bp, Homo sapiens
agatgatttartttaacatga

SEQ ID NO: 12058 - DNA, 21 bp, Homo sapiens
ttgccactaamtcatctctcc

SEQ ID NO: 12059 - DNA, 21 bp, Homo sapiens
actatctttgwtccatttgtg

SEQ ID NO: 12060 - DNA, 21 bp, Homo sapiens
ttttcttgcartcaactcatg

SEQ ID NO: 12061 - DNA, 21 bp, Homo sapiens
tttgctcttayggaattctag

SEQ ID NO: 12062 - DNA, 21 bp, Homo sapiens
gatgacaattraattcctgag

SEQ ID NO: 12063 - DNA, 21 bp, Homo sapiens
ctccttattaygacgataata

SEQ ID NO: 12064 - DNA, 21 bp, Homo sapiens
atcagcatagyatggttcctt

SEQ ID NO: 12065 - DNA, 21 bp, Homo sapiens
gtctgtttacmcaaggacaaa

SEQ ID NO: 12066 - DNA, 21 bp, Homo sapiens
gcaatacagtraaacatctac

SEQ ID NO: 12067 - DNA, 21 bp, Homo sapiens
tcatgctgatsgtagctacaa

SEQ ID NO: 12068 - DNA, 21 bp, Homo sapiens
tgaaatcccascattagacaa

SEQ ID NO: 12069 - DNA, 21 bp, Homo sapiens
ataaaaatgcyttggtgaatc

SEQ ID NO: 12070 - DNA, 21 bp, Homo sapiens
aaagtttatargagaaaaata

SEQ ID NO: 12071 - DNA, 21 bp, Homo sapiens
tattttctggrtatgttttct

SEQ ID NO: 12072 - DNA, 21 bp, Homo sapiens
caatcttccakttagagtgct

SEQ ID NO: 12073 - DNA, 21 bp, Homo sapiens
gctggtgcatwaaagagagca

SEQ ID NO: 12074 - DNA, 21 bp, Homo sapiens
taactaaggayactgatgtaa

SEQ ID NO: 12075 - DNA, 21 bp, Homo sapiens
aaaagcaagtyagtccactga

SEQ ID NO: 12076 - DNA, 21 bp, Homo sapiens
cttctttagcrcttatttctg

SEQ ID NO: 12077 - DNA, 21 bp, Homo sapiens
tttatatatayctacacataa

SEQ ID NO: 12078 - DNA, 21 bp, Homo sapiens
aaaaaaaaaaygaaaatgcac

SEQ ID NO: 12079 - DNA, 21 bp, Homo sapiens
aataaacagaygattgcttgg

SEQ ID NO: 12080 - DNA, 21 bp, Homo sapiens
tgcatctgaarcaactaaccc

SEQ ID NO: 12081 - DNA, 21 bp, Homo sapiens
agaaactttarttttcatact

SEQ ID NO: 12082 - DNA, 21 bp, Homo sapiens
tggaacaaatyagctgtaaca

SEQ ID NO: 12083 - DNA, 21 bp, Homo sapiens
aggtgttaaamattgctcata

SEQ ID NO: 12084 - DNA, 21 bp, Homo sapiens
cgctattgcasgtgttggtct

SEQ ID NO: 12085 - DNA, 21 bp, Homo sapiens
atatctttatkaagtactggg

SEQ ID NO: 12086 - DNA, 21 bp, Homo sapiens
gtttttctcaygtatcaatac

SEQ ID NO: 12087 - DNA, 21 bp, Homo sapiens
acccttacaaytgggcttaag

SEQ ID NO: 12088 - DNA, 21 bp, Homo sapiens
tattatataartggatccatc

SEQ ID NO: 12089 - DNA, 21 bp, Homo sapiens
ctgtgttttaygagtcaactt

SEQ ID NO: 12090 - DNA, 21 bp, Homo sapiens
cttaaatgagwctcatgtaag

SEQ ID NO: 12091 - DNA, 21 bp, Homo sapiens
gtccttaatgmaattcacctg

SEQ ID NO: 12092 - DNA, 21 bp, Homo sapiens
aaatttccgtmgttttgctat

SEQ ID NO: 12093 - DNA, 21 bp, Homo sapiens
acctatccacmaagacagaaa

SEQ ID NO: 12094 - DNA, 21 bp, Homo sapiens
ttactaagtcraattgtaaac

SEQ ID NO: 12095 - DNA, 21 bp, Homo sapiens
catgaatgtgrcttgaaagtc

SEQ ID NO: 12096 - DNA, 21 bp, Homo sapiens
tttcacattargtgtggacat

SEQ ID NO: 12097 - DNA, 21 bp, Homo sapiens
tgaactattcmattacaaaaa

SEQ ID NO: 12098 - DNA, 21 bp, Homo sapiens
tccaatgactraggccttgta

SEQ ID NO: 12099 - DNA, 21 bp, Homo sapiens
taccatggatygcttttggaa

SEQ ID NO: 12100 - DNA, 21 bp, Homo sapiens
gaataaataaygtctgaattt

SEQ ID NO: 12101 - DNA, 21 bp, Homo sapiens
aagaaaggaarcacaatttca

SEQ ID NO: 12102 - DNA, 21 bp, Homo sapiens
ggtactttcarggtatttatg

SEQ ID NO: 12103 - DNA, 21 bp, Homo sapiens
cttcttaggcwtttttttgat

SEQ ID NO: 12104 - DNA, 21 bp, Homo sapiens
gtggagaatayttctgaccat

SEQ ID NO: 12105 - DNA, 21 bp, Homo sapiens
tagcaataccwtattctggaa

SEQ ID NO: 12106 - DNA, 21 bp, Homo sapiens
gtatttatagraatgtgaatt

SEQ ID NO: 12107 - DNA, 21 bp, Homo sapiens
taactatagcytttgttccat

SEQ ID NO: 12108 - DNA, 21 bp, Homo sapiens
caaagcattcraattctaggg

SEQ ID NO: 12109 - DNA, 21 bp, Homo sapiens
tcagtagactrtgtcaaacac

SEQ ID NO: 12110 - DNA, 21 bp, Homo sapiens
caggtagccayctctgtatag

SEQ ID NO: 12111 - DNA, 21 bp, Homo sapiens
aagtgcaaggrtgccacagag

SEQ ID NO: 12112 - DNA, 21 bp, Homo sapiens
aaggcagagtktcttcttcgg

SEQ ID NO: 12113 - DNA, 21 bp, Homo sapiens
gagatatccakaatttcgcca

SEQ ID NO: 12114 - DNA, 21 bp, Homo sapiens
aacatcctaartggaaaggct

SEQ ID NO: 12115 - DNA, 21 bp, Homo sapiens
agatagcccargagcactggt

SEQ ID NO: 12116 - DNA, 21 bp, Homo sapiens
tggagggaagwtatcaagagt

SEQ ID NO: 12117 - DNA, 21 bp, Homo sapiens
aaacaggatgrtgcagtctaa

SEQ ID NO: 12118 - DNA, 21 bp, Homo sapiens
acacaggagaygggcctgtac

SEQ ID NO: 12119 - DNA, 21 bp, Homo sapiens
tggaaaacacraggttattca

SEQ ID NO: 12120 - DNA, 21 bp, Homo sapiens
ctagcaaattkgggcattttc

SEQ ID NO: 12121 - DNA, 21 bp, Homo sapiens
agtgagaattyaaccttttcc

SEQ ID NO: 12122 - DNA, 21 bp, Homo sapiens
tcttaagagtragcttcattt

SEQ ID NO: 12123 - DNA, 21 bp, Homo sapiens
ccatttattcygtataggcag

SEQ ID NO: 12124 - DNA, 21 bp, Homo sapiens
ctaccatattmaattggcagt

SEQ ID NO: 12125 - DNA, 21 bp, Homo sapiens
cattttactgygccatagtcc

SEQ ID NO: 12126 - DNA, 21 bp, Homo sapiens
aaaacatttcygtgacccagg

SEQ ID NO: 12127 - DNA, 21 bp, Homo sapiens
aaggaatcctytggactttag

SEQ ID NO: 12128 - DNA, 21 bp, Homo sapiens
ggatttttttktgtgtgttaa

SEQ ID NO: 12129 - DNA, 21 bp, Homo sapiens
taacgggaagsatctgcataa

SEQ ID NO: 12130 - DNA, 21 bp, Homo sapiens
tacagtgagayatctaaacaa

SEQ ID NO: 12131 - DNA, 21 bp, Homo sapiens
tttatagtccytttcactgag

SEQ ID NO: 12132 - DNA, 21 bp, Homo sapiens
actcctaatgrcatctgggag

SEQ ID NO: 12133 - DNA, 21 bp, Homo sapiens
tcagtacagaraggcacaaag

SEQ ID NO: 12134 - DNA, 21 bp, Homo sapiens
ggtgctgaaakagtgcagttg

SEQ ID NO: 12135 - DNA, 21 bp, Homo sapiens
ctcctcattartttatgatgc

SEQ ID NO: 12136 - DNA, 21 bp, Homo sapiens
caatctactayaggctgctat

SEQ ID NO: 12137 - DNA, 21 bp, Homo sapiens
gccatacacaytccagtaaca

SEQ ID NO: 12138 - DNA, 21 bp, Homo sapiens
tttatatatgrcctattaacc

SEQ ID NO: 12139 - DNA, 21 bp, Homo sapiens
tcttcattatytccactacac

SEQ ID NO: 12140 - DNA, 21 bp, Homo sapiens
ttggaggcaarcaatgcttct

SEQ ID NO: 12141 - DNA, 21 bp, Homo sapiens
caaatcatctstctgtctctt

SEQ ID NO: 12142 - DNA, 21 bp, Homo sapiens
ttttatgaccwtatatttttc

SEQ ID NO: 12143 - DNA, 21 bp, Homo sapiens
ccataatctcygaaataatta

SEQ ID NO: 12144 - DNA, 21 bp, Homo sapiens
gtgaggtacartatataaact

SEQ ID NO: 12145 - DNA, 21 bp, Homo sapiens
aagactaattsggaatgctac

SEQ ID NO: 12146 - DNA, 21 bp, Homo sapiens
aaatagtggcrtgagaatggt

SEQ ID NO: 12147 - DNA, 21 bp, Homo sapiens
ggcagtattckttgaatgtga

SEQ ID NO: 12148 - DNA, 21 bp, Homo sapiens
atagcaacagwtgagttcaga

SEQ ID NO: 12149 - DNA, 21 bp, Homo sapiens
tgacaattacmctggatttac

SEQ ID NO: 12150 - DNA, 21 bp, Homo sapiens
atgacttatgygttggtacat

SEQ ID NO: 12151 - DNA, 21 bp, Homo sapiens
caattgaggtmaccactttaa

SEQ ID NO: 12152 - DNA, 21 bp, Homo sapiens
gtattttttgycaaatgtaaa

SEQ ID NO: 12153 - DNA, 21 bp, Homo sapiens
ccaatcaaatrttaaacaatt

SEQ ID NO: 12154 - DNA, 21 bp, Homo sapiens
attactgaaayttaatagtat

SEQ ID NO: 12155 - DNA, 21 bp, Homo sapiens
taggcttagcrtaatgcctga

SEQ ID NO: 12156 - DNA, 21 bp, Homo sapiens
aggaggatacwgggattccac

SEQ ID NO: 12157 - DNA, 21 bp, Homo sapiens
ccaaatccccrgtgatactca

SEQ ID NO: 12158 - DNA, 21 bp, Homo sapiens
ttctgaaccarcatcaggaag

SEQ ID NO: 12159 - DNA, 21 bp, Homo sapiens
ttctttttcayatggccttgt

SEQ ID NO: 12160 - DNA, 21 bp, Homo sapiens
aaaacttaaaygggcttgaca

SEQ ID NO: 12161 - DNA, 21 bp, Homo sapiens
gtaattgattyagcagaccca

SEQ ID NO: 12162 - DNA, 21 bp, Homo sapiens
tctagctaaaytgggccttta

SEQ ID NO: 12163 - DNA, 21 bp, Homo sapiens
gaaatgctaaygacaagtctg

SEQ ID NO: 12164 - DNA, 21 bp, Homo sapiens
aaaagaccctmccttattgca

SEQ ID NO: 12165 - DNA, 21 bp, Homo sapiens
aagcttggtgraggtaaactc

SEQ ID NO: 12166 - DNA, 21 bp, Homo sapiens
ttctgaatgayagtgatagca

SEQ ID NO: 12167 - DNA, 21 bp, Homo sapiens
gcttgaagcayacttccatgt

SEQ ID NO: 12168 - DNA, 21 bp, Homo sapiens
gtgcataaatrccacttcctg

SEQ ID NO: 12169 - DNA, 21 bp, Homo sapiens
ctaaaattatraacttaaatt

SEQ ID NO: 12170 - DNA, 21 bp, Homo sapiens
taagcagcacrgatgatgccc

SEQ ID NO: 12171 - DNA, 21 bp, Homo sapiens
cacagctccawggtaatggct

SEQ ID NO: 12172 - DNA, 21 bp, Homo sapiens
acatggtaagmaaagtaattc

SEQ ID NO: 12173 - DNA, 21 bp, Homo sapiens
ataaggtcccygttagcaaag

SEQ ID NO: 12174 - DNA, 21 bp, Homo sapiens
aaaagagaagrctgggagctg

SEQ ID NO: 12175 - DNA, 21 bp, Homo sapiens
aaagaggaagwcatctgtgta

SEQ ID NO: 12176 - DNA, 21 bp, Homo sapiens
tgaaatatcartgaagacaag

SEQ ID NO: 12177 - DNA, 21 bp, Homo sapiens
ctagtttaccrctcagatctc

SEQ ID NO: 12178 - DNA, 21 bp, Homo sapiens
ttaattgataratatataccc

SEQ ID NO: 12179 - DNA, 21 bp, Homo sapiens
tacctgatacyaagctactca

SEQ ID NO: 12180 - DNA, 21 bp, Homo sapiens
tggttaaattrtcaaccaggg

SEQ ID NO: 12181 - DNA, 21 bp, Homo sapiens
cacaacctcartgaaaggcag

SEQ ID NO: 12182 - DNA, 21 bp, Homo sapiens
aaattatgaawggatgaatta

SEQ ID NO: 12183 - DNA, 21 bp, Homo sapiens
tttaagttcaygatgtcattt

SEQ ID NO: 12184 - DNA, 21 bp, Homo sapiens
ctgtgaaaccraaggcttgtt

SEQ ID NO: 12185 - DNA, 21 bp, Homo sapiens
attgtatctgstgggaggatt

SEQ ID NO: 12186 - DNA, 21 bp, Homo sapiens
tgtgacagaarcatgtatatt

SEQ ID NO: 12187 - DNA, 21 bp, Homo sapiens
acaaacaaaaracaagttgta

SEQ ID NO: 12188 - DNA, 21 bp, Homo sapiens
aaggaagttcmgtgttgaaat

SEQ ID NO: 12189 - DNA, 21 bp, Homo sapiens
ctcttgatacrtttacagatt

SEQ ID NO: 12190 - DNA, 21 bp, Homo sapiens
atatttcatayttacaacagt

SEQ ID NO: 12191 - DNA, 21 bp, Homo sapiens
aacttaaaatytgtcatgatt

SEQ ID NO: 12192 - DNA, 21 bp, Homo sapiens
agtctgaaacwtgtcttacgt

SEQ ID NO: 12193 - DNA, 21 bp, Homo sapiens
cttccaaatawccaatcatac

SEQ ID NO: 12194 - DNA, 21 bp, Homo sapiens
tgcaaagagcyaacaactaat

SEQ ID NO: 12195 - DNA, 21 bp, Homo sapiens
acttgtaaaamtctaattttg

SEQ ID NO: 12196 - DNA, 21 bp, Homo sapiens
atattaatgascatttacggt

SEQ ID NO: 12197 - DNA, 21 bp, Homo sapiens
aagtttttatrtccaaaggca

SEQ ID NO: 12198 - DNA, 21 bp, Homo sapiens
atagtaatcaygtcagagttc

SEQ ID NO: 12199 - DNA, 21 bp, Homo sapiens
tttgaaaatartgggaaatgg

SEQ ID NO: 12200 - DNA, 21 bp, Homo sapiens
ctgagacagaytaatttttca

SEQ ID NO: 12201 - DNA, 21 bp, Homo sapiens
ttagcttcatyaaaaaaataa

SEQ ID NO: 12202 - DNA, 21 bp, Homo sapiens
ccgtttttatygccaaggcct

SEQ ID NO: 12203 - DNA, 21 bp, Homo sapiens
tagcatagtgstgtgaatata

SEQ ID NO: 12204 - DNA, 21 bp, Homo sapiens
gcaattagcartagatgtcag

SEQ ID NO: 12205 - DNA, 21 bp, Homo sapiens
taagcttctcsgcccctcagc

SEQ ID NO: 12206 - DNA, 21 bp, Homo sapiens
taaaagtctcrctagaagcca

SEQ ID NO: 12207 - DNA, 21 bp, Homo sapiens
tcattcagtayaggtgcattg

SEQ ID NO: 12208 - DNA, 21 bp, Homo sapiens
gcatgctcacwatcgaagctc

SEQ ID NO: 12209 - DNA, 21 bp, Homo sapiens
tcaatactgaygagcaataca

SEQ ID NO: 12210 - DNA, 21 bp, Homo sapiens
ggtatacagarcatttgctta

SEQ ID NO: 12211 - DNA, 21 bp, Homo sapiens
tcccaactttycattttatta

SEQ ID NO: 12212 - DNA, 21 bp, Homo sapiens
gcttgtctatygggctcagga

SEQ ID NO: 12213 - DNA, 21 bp, Homo sapiens
atttctattayaattgtcacc

SEQ ID NO: 12214 - DNA, 21 bp, Homo sapiens
tttcagaaagrctaatgtagc

SEQ ID NO: 12215 - DNA, 21 bp, Homo sapiens
tacagaaaacrttttttccat

SEQ ID NO: 12216 - DNA, 21 bp, Homo sapiens
tagtcagtttycttctctgtg

SEQ ID NO: 12217 - DNA, 21 bp, Homo sapiens
ggataactcarttattctggc

SEQ ID NO: 12218 - DNA, 21 bp, Homo sapiens
gtatgggtgcktacatgagcg

SEQ ID NO: 12219 - DNA, 21 bp, Homo sapiens
gatacaagaargagtgaagga

SEQ ID NO: 12220 - DNA, 21 bp, Homo sapiens
gatgagccgargtaaacagac

SEQ ID NO: 12221 - DNA, 21 bp, Homo sapiens
tacaaatatartcttcccaga

SEQ ID NO: 12222 - DNA, 21 bp, Homo sapiens
gagatgcaaaraaagcatgtt

SEQ ID NO: 12223 - DNA, 21 bp, Homo sapiens
ttatgcatgayggacattgtc

SEQ ID NO: 12224 - DNA, 21 bp, Homo sapiens
ttctatgtgcmtatttctcta

SEQ ID NO: 12225 - DNA, 21 bp, Homo sapiens
gaggggtgccycaagattaag

SEQ ID NO: 12226 - DNA, 21 bp, Homo sapiens
atgttttgcakggcagcttct

SEQ ID NO: 12227 - DNA, 21 bp, Homo sapiens
aagcaccactytgatcatcta

SEQ ID NO: 12228 - DNA, 21 bp, Homo sapiens
cctaataatartaattccgtg

SEQ ID NO: 12229 - DNA, 21 bp, Homo sapiens
caaggatttgrtgctgatact

SEQ ID NO: 12230 - DNA, 21 bp, Homo sapiens
tctcctgtgcytcgggacccc

SEQ ID NO: 12231 - DNA, 21 bp, Homo sapiens
tagattgataygcagagtaaa

SEQ ID NO: 12232 - DNA, 21 bp, Homo sapiens
ttttagtcacygcaacctttt

SEQ ID NO: 12233 - DNA, 21 bp, Homo sapiens
tattttctcgstgacctccac

SEQ ID NO: 12234 - DNA, 21 bp, Homo sapiens
atcggtatcarttttttgagg

SEQ ID NO: 12235 - DNA, 21 bp, Homo sapiens
gaaatttctgycctttgagta

SEQ ID NO: 12236 - DNA, 21 bp, Homo sapiens
aagtttatgtraagtcattga

SEQ ID NO: 12237 - DNA, 21 bp, Homo sapiens
taccaaaatgmaaccttgtag

SEQ ID NO: 12238 - DNA, 21 bp, Homo sapiens
tgatggacgtkatggccttgc

SEQ ID NO: 12239 - DNA, 21 bp, Homo sapiens
gaaagtgtaayttaaattttt

SEQ ID NO: 12240 - DNA, 21 bp, Homo sapiens
ctgacggtctrttttccagag

SEQ ID NO: 12241 - DNA, 21 bp, Homo sapiens
cccaaaacttkattaagtacg

SEQ ID NO: 12242 - DNA, 21 bp, Homo sapiens
cacggctcgtycctggacacg

SEQ ID NO: 12243 - DNA, 21 bp, Homo sapiens
tctgtatccargtatcagaga

SEQ ID NO: 12244 - DNA, 21 bp, Homo sapiens
gatactatgargttgcaaaaa

SEQ ID NO: 12245 - DNA, 21 bp, Homo sapiens
cggcccaggtrtggcaaaatt

SEQ ID NO: 12246 - DNA, 21 bp, Homo sapiens
atactgaagawtgtttccata

SEQ ID NO: 12247 - DNA, 21 bp, Homo sapiens
cttccacaaakgtaaaggccc

SEQ ID NO: 12248 - DNA, 21 bp, Homo sapiens
tctatggattmatgggtgtct

SEQ ID NO: 12249 - DNA, 21 bp, Homo sapiens
ccagtaaaagwtctgtaacat

SEQ ID NO: 12250 - DNA, 21 bp, Homo sapiens
attctaagaayaatttttaaa

SEQ ID NO: 12251 - DNA, 21 bp, Homo sapiens
acaacatgtcrcagtaaatag

SEQ ID NO: 12252 - DNA, 21 bp, Homo sapiens
ggagacttggstttcaggctt

SEQ ID NO: 12253 - DNA, 21 bp, Homo sapiens
agctgccctgygctacagttt

SEQ ID NO: 12254 - DNA, 21 bp, Homo sapiens
acttctgtttyctctgttact

SEQ ID NO: 12255 - DNA, 21 bp, Homo sapiens
tctggttgggraagtaagcaa

SEQ ID NO: 12256 - DNA, 21 bp, Homo sapiens
tggtcactgaytatgtgatat

SEQ ID NO: 12257 - DNA, 21 bp, Homo sapiens
tcgcacagccyagtcagcgca

SEQ ID NO: 12258 - DNA, 21 bp, Homo sapiens
cagcgaagtasgactgtgact

SEQ ID NO: 12259 - DNA, 21 bp, Homo sapiens
ggaagccgttkccaccgccct

SEQ ID NO: 12260 - DNA, 21 bp, Homo sapiens
gccccagactytcatgtggat

SEQ ID NO: 12261 - DNA, 21 bp, Homo sapiens
caggcaagccrctaacgtgaa

SEQ ID NO: 12262 - DNA, 21 bp, Homo sapiens
ttcctgcagastggtacaaat

SEQ ID NO: 12263 - DNA, 21 bp, Homo sapiens
cacgtcttccygtgtctaaag

SEQ ID NO: 12264 - DNA, 21 bp, Homo sapiens
caaatttacgkgttcactggt

SEQ ID NO: 12265 - DNA, 21 bp, Homo sapiens
attgtcatgaygaggctcatt

SEQ ID NO: 12266 - DNA, 21 bp, Homo sapiens
catccagttcrtcggctacgt

SEQ ID NO: 12267 - DNA, 21 bp, Homo sapiens
aacagtcaccmtcaaaaaaca

SEQ ID NO: 12268 - DNA, 21 bp, Homo sapiens
atcccagtacrgaacctgcta

SEQ ID NO: 12269 - DNA, 21 bp, Homo sapiens
tttctggtttrataataaaat

SEQ ID NO: 12270 - DNA, 21 bp, Homo sapiens
gcatggaacartttgaaagca

SEQ ID NO: 12271 - DNA, 21 bp, Homo sapiens
gaggtttttgycagcaccgta

SEQ ID NO: 12272 - DNA, 21 bp, Homo sapiens
gctacaatgaygcatgcacaa

SEQ ID NO: 12273 - DNA, 21 bp, Homo sapiens
atcctggtggsggagagaggg

SEQ ID NO: 12274 - DNA, 21 bp, Homo sapiens
tttatttccasacattacaat

SEQ ID NO: 12275 - DNA, 21 bp, Homo sapiens
tgggacctacmataaagtgta

SEQ ID NO: 12276 - DNA, 21 bp, Homo sapiens
tcccattgttytgttctacgg

SEQ ID NO: 12277 - DNA, 21 bp, Homo sapiens
aaatgaattcrcacgagggag

SEQ ID NO: 12278 - DNA, 21 bp, Homo sapiens
ttagctatttrtaaagagaaa

SEQ ID NO: 12279 - DNA, 21 bp, Homo sapiens
cctggtgctgygatttaaaat

SEQ ID NO: 12280 - DNA, 21 bp, Homo sapiens
atagatttagkgagactaagc

SEQ ID NO: 12281 - DNA, 21 bp, Homo sapiens
tttttaatgcrtatacaaaca

SEQ ID NO: 12282 - DNA, 21 bp, Homo sapiens
aaattgatgamctctatagct

SEQ ID NO: 12283 - DNA, 21 bp, Homo sapiens
gagaccaaatrcagaatatgt

SEQ ID NO: 12284 - DNA, 21 bp, Homo sapiens
ttattatatargaatgattgc

SEQ ID NO: 12285 - DNA, 21 bp, Homo sapiens
tccagtataamagaaatctac

SEQ ID NO: 12286 - DNA, 21 bp, Homo sapiens
taatgcaggtrtctgtattag

SEQ ID NO: 12287 - DNA, 21 bp, Homo sapiens
tacacatagtragtaacaata

SEQ ID NO: 12288 - DNA, 21 bp, Homo sapiens
tatgaagaaawtgcacgttgt

SEQ ID NO: 12289 - DNA, 21 bp, Homo sapiens
gcttcccatcygtgtaggagc

SEQ ID NO: 12290 - DNA, 21 bp, Homo sapiens
gtattattaasaaaaatacag

SEQ ID NO: 12291 - DNA, 21 bp, Homo sapiens
aaaggttacaycgaaattcta

SEQ ID NO: 12292 - DNA, 21 bp, Homo sapiens
tatttaaaaamtttcaaatgg

SEQ ID NO: 12293 - DNA, 21 bp, Homo sapiens
tttaatggatrgaatagtgat

SEQ ID NO: 12294 - DNA, 21 bp, Homo sapiens
caagctccacrttatgtattt

SEQ ID NO: 12295 - DNA, 21 bp, Homo sapiens
gcaaatatgakgtatatcaat

SEQ ID NO: 12296 - DNA, 21 bp, Homo sapiens
ttcctagttaytgcttttcag

SEQ ID NO: 12297 - DNA, 21 bp, Homo sapiens
ggtaaaataarcactagaatc

SEQ ID NO: 12298 - DNA, 21 bp, Homo sapiens
tgttaaacacrtggatttccc

SEQ ID NO: 12299 - DNA, 21 bp, Homo sapiens
tgagctaatgmcatgagccct

SEQ ID NO: 12300 - DNA, 21 bp, Homo sapiens
ttctctaatayagtctatcaa

SEQ ID NO: 12301 - DNA, 21 bp, Homo sapiens
tcagaaacctytgacatctag

SEQ ID NO: 12302 - DNA, 21 bp, Homo sapiens
atatgtactcygatattcttt

SEQ ID NO: 12303 - DNA, 21 bp, Homo sapiens
cattcatttgwaaaaattaca

SEQ ID NO: 12304 - DNA, 21 bp, Homo sapiens
ccagttttttwaaaatttgta

SEQ ID NO: 12305 - DNA, 21 bp, Homo sapiens
aactataattyttaaagaaat

SEQ ID NO: 12306 - DNA, 21 bp, Homo sapiens
tttaagtgtaygatttaatgt

SEQ ID NO: 12307 - DNA, 21 bp, Homo sapiens
gaaggatgtarcatagtttga

SEQ ID NO: 12308 - DNA, 21 bp, Homo sapiens
tattgataagyaacctccttt

SEQ ID NO: 12309 - DNA, 21 bp, Homo sapiens
ccaaaaatttrgagatttctt

SEQ ID NO: 12310 - DNA, 21 bp, Homo sapiens
attaaattaamaaggaactat

SEQ ID NO: 12311 - DNA, 21 bp, Homo sapiens
aattatgtacmaaatgatgta

SEQ ID NO: 12312 - DNA, 21 bp, Homo sapiens
cacctggcaayttgaggaagt

SEQ ID NO: 12313 - DNA, 21 bp, Homo sapiens
tatgattaatmctgattgttg

SEQ ID NO: 12314 - DNA, 21 bp, Homo sapiens
aagttgcgtcyggtttaactg

SEQ ID NO: 12315 - DNA, 21 bp, Homo sapiens
aagccttagaragaaaatggt

SEQ ID NO: 12316 - DNA, 21 bp, Homo sapiens
gccctaagttrgtcagcttaa

SEQ ID NO: 12317 - DNA, 21 bp, Homo sapiens
cccaagtctgwtgggattcca

SEQ ID NO: 12318 - DNA, 21 bp, Homo sapiens
caagatggtakatttatacct

SEQ ID NO: 12319 - DNA, 21 bp, Homo sapiens
taaaataatgyggattgcatt

SEQ ID NO: 12320 - DNA, 21 bp, Homo sapiens
ttggtagtaarttaggttgat

SEQ ID NO: 12321 - DNA, 21 bp, Homo sapiens
cagaagtcttraatacaggta

SEQ ID NO: 12322 - DNA, 21 bp, Homo sapiens
ttttcaatatrtagcagtaag

SEQ ID NO: 12323 - DNA, 21 bp, Homo sapiens
cagaatctaaygacaatgaag

SEQ ID NO: 12324 - DNA, 21 bp, Homo sapiens
ccatatttcaygattaagtct

SEQ ID NO: 12325 - DNA, 21 bp, Homo sapiens
aggaggaaacktaattattac

SEQ ID NO: 12326 - DNA, 21 bp, Homo sapiens
aaaaaagtctrtttgaacata

SEQ ID NO: 12327 - DNA, 21 bp, Homo sapiens
catgacttcarcatcatccca

SEQ ID NO: 12328 - DNA, 21 bp, Homo sapiens
aacaatgtgarataaatactt

SEQ ID NO: 12329 - DNA, 21 bp, Homo sapiens
aagccaaggtraagttcatag

SEQ ID NO: 12330 - DNA, 21 bp, Homo sapiens
agataacagcrgaaaagggac

SEQ ID NO: 12331 - DNA, 21 bp, Homo sapiens
atgaaaaactktaagctcaat

SEQ ID NO: 12332 - DNA, 21 bp, Homo sapiens
aagacgagttrtattttatag

SEQ ID NO: 12333 - DNA, 21 bp, Homo sapiens
cactctatacmattcaaatta

SEQ ID NO: 12334 - DNA, 21 bp, Homo sapiens
tattagaaatrttactgtgtt

SEQ ID NO: 12335 - DNA, 21 bp, Homo sapiens
atgatatgagygcaaaaatac

SEQ ID NO: 12336 - DNA, 21 bp, Homo sapiens
cagtgtattgytctcacaacc

SEQ ID NO: 12337 - DNA, 21 bp, Homo sapiens
ttgttttgatrccaaagggag

SEQ ID NO: 12338 - DNA, 21 bp, Homo sapiens
gtttgcttttytaataaagtt

SEQ ID NO: 12339 - DNA, 21 bp, Homo sapiens
ggaaaaacaamttctttacta

SEQ ID NO: 12340 - DNA, 21 bp, Homo sapiens
ttttttctgcrtggcatttga

SEQ ID NO: 12341 - DNA, 21 bp, Homo sapiens
aacagaaatcrataacacatt

SEQ ID NO: 12342 - DNA, 21 bp, Homo sapiens
aataataagcrtctaccagtt

SEQ ID NO: 12343 - DNA, 21 bp, Homo sapiens
tctgtttcagyagcagaggat

SEQ ID NO: 12344 - DNA, 21 bp, Homo sapiens
taacggagaartagaatactc

SEQ ID NO: 12345 - DNA, 21 bp, Homo sapiens
aagattctacrtaacgagtaa

SEQ ID NO: 12346 - DNA, 21 bp, Homo sapiens
gaagcatccaytctgagtcag

SEQ ID NO: 12347 - DNA, 21 bp, Homo sapiens
atcttttagtycctaatgcct

SEQ ID NO: 12348 - DNA, 21 bp, Homo sapiens
agactatattwatttaaaact

SEQ ID NO: 12349 - DNA, 21 bp, Homo sapiens
actttttgccwtaggtttacc

SEQ ID NO: 12350 - DNA, 21 bp, Homo sapiens
gcttaaatgaraaagatggtc

SEQ ID NO: 12351 - DNA, 21 bp, Homo sapiens
ggtgagaaggkccctgtattc

SEQ ID NO: 12352 - DNA, 21 bp, Homo sapiens
agtgccagaamgactaacagg

SEQ ID NO: 12353 - DNA, 21 bp, Homo sapiens
caggagaaaasgagatttcta

SEQ ID NO: 12354 - DNA, 21 bp, Homo sapiens
cattagtactktcacattact

SEQ ID NO: 12355 - DNA, 21 bp, Homo sapiens
atatgaggagwccctgcacgc

SEQ ID NO: 12356 - DNA, 21 bp, Homo sapiens
ttacttttcargtcccttcaa

SEQ ID NO: 12357 - DNA, 21 bp, Homo sapiens
catccatttaytataagtgta

SEQ ID NO: 12358 - DNA, 21 bp, Homo sapiens
ccaaacttcaraaagacattg

SEQ ID NO: 12359 - DNA, 21 bp, Homo sapiens
ttcagtgtatracacagtgca

SEQ ID NO: 12360 - DNA, 21 bp, Homo sapiens
tttgtattttygagtatgtat

SEQ ID NO: 12361 - DNA, 21 bp, Homo sapiens
gaaacatgagkaatctcccaa

SEQ ID NO: 12362 - DNA, 21 bp, Homo sapiens
aaatattcccyctgggcagaa

SEQ ID NO: 12363 - DNA, 21 bp, Homo sapiens
acgtgggttcytgatatttca

SEQ ID NO: 12364 - DNA, 21 bp, Homo sapiens
ttcacacgtcratggtaacat

SEQ ID NO: 12365 - DNA, 21 bp, Homo sapiens
aagcttatttytaggtcagta

SEQ ID NO: 12366 - DNA, 21 bp, Homo sapiens
ctgaaaatttraggatagcag

SEQ ID NO: 12367 - DNA, 21 bp, Homo sapiens
gagtgagtttkcattctaatt

SEQ ID NO: 12368 - DNA, 21 bp, Homo sapiens
atcaaccatarcgtagccaag

SEQ ID NO: 12369 - DNA, 21 bp, Homo sapiens
catcacgaacygggaagtagg

SEQ ID NO: 12370 - DNA, 21 bp, Homo sapiens
atgttgacaayatttaacatc

SEQ ID NO: 12371 - DNA, 21 bp, Homo sapiens
ctgaagccatrtatattatag

SEQ ID NO: 12372 - DNA, 21 bp, Homo sapiens
aatatctgagyaattgggaca

SEQ ID NO: 12373 - DNA, 21 bp, Homo sapiens
tcccgtgatcygccagaactt

SEQ ID NO: 12374 - DNA, 21 bp, Homo sapiens
agacatatcamaaaaagcagc

SEQ ID NO: 12375 - DNA, 21 bp, Homo sapiens
agcaaaaactktctctgatca

SEQ ID NO: 12376 - DNA, 21 bp, Homo sapiens
gatgccagttmtcccatacaa

SEQ ID NO: 12377 - DNA, 21 bp, Homo sapiens
tatatttttastatcaaatct

SEQ ID NO: 12378 - DNA, 21 bp, Homo sapiens
tttcacacttrctaagaacaa

SEQ ID NO: 12379 - DNA, 21 bp, Homo sapiens
ttaatcaactyatcagggata

SEQ ID NO: 12380 - DNA, 21 bp, Homo sapiens
aaagacactckacagatggca

SEQ ID NO: 12381 - DNA, 21 bp, Homo sapiens
catcctaccaygtgtaaaaca

SEQ ID NO: 12382 - DNA, 21 bp, Homo sapiens
aacctgtggakattagcatgg

SEQ ID NO: 12383 - DNA, 21 bp, Homo sapiens
tttcatcaacygggacagtaa

SEQ ID NO: 12384 - DNA, 21 bp, Homo sapiens
gtgttgatatsatatagacct

SEQ ID NO: 12385 - DNA, 21 bp, Homo sapiens
ataagagaaawggaaagagaa

SEQ ID NO: 12386 - DNA, 21 bp, Homo sapiens
gaaggcataaytgcatactta

SEQ ID NO: 12387 - DNA, 21 bp, Homo sapiens
tgataattttkaagaaaactt

SEQ ID NO: 12388 - DNA, 21 bp, Homo sapiens
ctgtgaactgyagaattcttt

SEQ ID NO: 12389 - DNA, 21 bp, Homo sapiens
aagtctttcaraatcaaacct

SEQ ID NO: 12390 - DNA, 21 bp, Homo sapiens
aatcaaggctscatccgtaat

SEQ ID NO: 12391 - DNA, 21 bp, Homo sapiens
ctcttccattyttcatatatc

SEQ ID NO: 12392 - DNA, 21 bp, Homo sapiens
catggattatrtacttagaag

SEQ ID NO: 12393 - DNA, 21 bp, Homo sapiens
atatggcaaargattataagt

SEQ ID NO: 12394 - DNA, 21 bp, Homo sapiens
gactccagatwtactttggta

SEQ ID NO: 12395 - DNA, 21 bp, Homo sapiens
cagatcctgcygtgacccatt

SEQ ID NO: 12396 - DNA, 21 bp, Homo sapiens
atggtactggycttcaaggtc

SEQ ID NO: 12397 - DNA, 21 bp, Homo sapiens
tatatgttaartgatcttgtg

SEQ ID NO: 12398 - DNA, 21 bp, Homo sapiens
tgaaggtttayaataaaatat

SEQ ID NO: 12399 - DNA, 21 bp, Homo sapiens
gagatcactakgatttaggca

SEQ ID NO: 12400 - DNA, 21 bp, Homo sapiens
acgttaggatscaaggagacc

SEQ ID NO: 12401 - DNA, 21 bp, Homo sapiens
ggtgaagagaycagatttatt

SEQ ID NO: 12402 - DNA, 21 bp, Homo sapiens
ccaacaacagsacaattaaaa

SEQ ID NO: 12403 - DNA, 21 bp, Homo sapiens
aaaataatctyaattcaactt

SEQ ID NO: 12404 - DNA, 21 bp, Homo sapiens
tcctctgtgtycttattatac

SEQ ID NO: 12405 - DNA, 21 bp, Homo sapiens
gatttgcaacrtatcatcaat

SEQ ID NO: 12406 - DNA, 21 bp, Homo sapiens
tgtagctactstttgaaattt

SEQ ID NO: 12407 - DNA, 21 bp, Homo sapiens
ttcattcgackggcacagttt

SEQ ID NO: 12408 - DNA, 21 bp, Homo sapiens
tccctaagackttaacaacaa

SEQ ID NO: 12409 - DNA, 21 bp, Homo sapiens
gctgggccatrtgaagaaaga

SEQ ID NO: 12410 - DNA, 21 bp, Homo sapiens
taagaaataaycattttcatt

SEQ ID NO: 12411 - DNA, 21 bp, Homo sapiens
ggcctgcagaygatcctgcct

SEQ ID NO: 12412 - DNA, 21 bp, Homo sapiens
taaagtattgmtaatagagaa

SEQ ID NO: 12413 - DNA, 21 bp, Homo sapiens
tttaatacgcytttacatatt

SEQ ID NO: 12414 - DNA, 21 bp, Homo sapiens
aacagactagytcttagcaaa

SEQ ID NO: 12415 - DNA, 21 bp, Homo sapiens
aggaagcaacrtgctgggaag

SEQ ID NO: 12416 - DNA, 21 bp, Homo sapiens
agttaacacartgattcattc

SEQ ID NO: 12417 - DNA, 21 bp, Homo sapiens
aacgctctccsagatacctca

SEQ ID NO: 12418 - DNA, 21 bp, Homo sapiens
cagttcaaaastcgtcttctt

SEQ ID NO: 12419 - DNA, 21 bp, Homo sapiens
atgaccttccrcaggacccaa

SEQ ID NO: 12420 - DNA, 21 bp, Homo sapiens
tcctggaggtrggcgccttct

SEQ ID NO: 12421 - DNA, 21 bp, Homo sapiens
gtttcttaaargaacgataaa

SEQ ID NO: 12422 - DNA, 21 bp, Homo sapiens
ttagtgaagcrctgtgcacag

SEQ ID NO: 12423 - DNA, 21 bp, Homo sapiens
gtatatgaggygataagcccc

SEQ ID NO: 12424 - DNA, 21 bp, Homo sapiens
atccactctgyagtctaggtg

SEQ ID NO: 12425 - DNA, 21 bp, Homo sapiens
tcctcttgtayggtgctccta

SEQ ID NO: 12426 - DNA, 21 bp, Homo sapiens
gcaagagctargaccccatta

SEQ ID NO: 12427 - DNA, 21 bp, Homo sapiens
cgtcatcatcstctttatcct

SEQ ID NO: 12428 - DNA, 21 bp, Homo sapiens
catcacaggarcatgtcttcc

SEQ ID NO: 12429 - DNA, 21 bp, Homo sapiens
ccctgttaagwtatcaccaac

SEQ ID NO: 12430 - DNA, 21 bp, Homo sapiens
aaactatccamtgaaaagctt

SEQ ID NO: 12431 - DNA, 21 bp, Homo sapiens
aagctttaaaygttccttgct

SEQ ID NO: 12432 - DNA, 21 bp, Homo sapiens
gatctttttartaaccctgag

SEQ ID NO: 12433 - DNA, 21 bp, Homo sapiens
gagttcctttycctaataaat

SEQ ID NO: 12434 - DNA, 21 bp, Homo sapiens
accacaagctscatctatcag

SEQ ID NO: 12435 - DNA, 21 bp, Homo sapiens
agagatagccyaagcgttgtc

SEQ ID NO: 12436 - DNA, 21 bp, Homo sapiens
ttctgagaggwgtaaaaaaat

SEQ ID NO: 12437 - DNA, 21 bp, Homo sapiens
taaaatcagaygaagcctcga

SEQ ID NO: 12438 - DNA, 21 bp, Homo sapiens
ttcagaaggartgatatatga

SEQ ID NO: 12439 - DNA, 21 bp, Homo sapiens
atgcttatgtytataggtatc

SEQ ID NO: 12440 - DNA, 21 bp, Homo sapiens
tttcctggttkattcatatag

SEQ ID NO: 12441 - DNA, 21 bp, Homo sapiens
ctaagcctaarattgaggatt

SEQ ID NO: 12442 - DNA, 21 bp, Homo sapiens
aatacaggctrtatgtgaaat

SEQ ID NO: 12443 - DNA, 21 bp, Homo sapiens
taataggatgwtctctgtaat

SEQ ID NO: 12444 - DNA, 21 bp, Homo sapiens
ccaaatgtgtygaatggatga

SEQ ID NO: 12445 - DNA, 21 bp, Homo sapiens
atgtgggaagstagaccacta

SEQ ID NO: 12446 - DNA, 21 bp, Homo sapiens
gttttagtagktttcagataa

SEQ ID NO: 12447 - DNA, 21 bp, Homo sapiens
ttctagcatastttagctcag

SEQ ID NO: 12448 - DNA, 21 bp, Homo sapiens
ataaattgttstttgagaatg

SEQ ID NO: 12449 - DNA, 21 bp, Homo sapiens
aaagataatamatcatttcat

SEQ ID NO: 12450 - DNA, 21 bp, Homo sapiens
atcctctcctscttcaacttc

SEQ ID NO: 12451 - DNA, 21 bp, Homo sapiens
taggcctaggrccccacgctc

SEQ ID NO: 12452 - DNA, 21 bp, Homo sapiens
ccttatgaccrtctgtgcttg

SEQ ID NO: 12453 - DNA, 21 bp, Homo sapiens
catgcagactrgtgctcacaa

SEQ ID NO: 12454 - DNA, 21 bp, Homo sapiens
gtttcagacaytgacgttact

SEQ ID NO: 12455 - DNA, 21 bp, Homo sapiens
gtgaattagaygaaagttgtg

SEQ ID NO: 12456 - DNA, 21 bp, Homo sapiens
cacatgattcrtagtggccct

SEQ ID NO: 12457 - DNA, 21 bp, Homo sapiens
aaagacagcayataggaattg

SEQ ID NO: 12458 - DNA, 21 bp, Homo sapiens
ttagggggatrctaatagact

SEQ ID NO: 12459 - DNA, 21 bp, Homo sapiens
acttcagattrgacctcattt

SEQ ID NO: 12460 - DNA, 21 bp, Homo sapiens
atgatgatttkttaccaggaa

SEQ ID NO: 12461 - DNA, 21 bp, Homo sapiens
tcattctctakatgcttctat

SEQ ID NO: 12462 - DNA, 21 bp, Homo sapiens
gtgaattctgygaataaaaac

SEQ ID NO: 12463 - DNA, 21 bp, Homo sapiens
acttaaatctstgcacaagta

SEQ ID NO: 12464 - DNA, 21 bp, Homo sapiens
ccaagtgccamaacggaaaag

SEQ ID NO: 12465 - DNA, 21 bp, Homo sapiens
ctagcagagcrccatagcagg

SEQ ID NO: 12466 - DNA, 21 bp, Homo sapiens
gagtagcaccygggagagcag

SEQ ID NO: 12467 - DNA, 21 bp, Homo sapiens
gataatgttayggatgtagaa

SEQ ID NO: 12468 - DNA, 21 bp, Homo sapiens
ggacagatagygtcttcactg

SEQ ID NO: 12469 - DNA, 21 bp, Homo sapiens
acagtcatgaycatactgtat

SEQ ID NO: 12470 - DNA, 21 bp, Homo sapiens
ccatgtgcccraacctgtttt

SEQ ID NO: 12471 - DNA, 21 bp, Homo sapiens
ttcatgtccarcattctcaat

SEQ ID NO: 12472 - DNA, 21 bp, Homo sapiens
agagtctgaargagcctagtg

SEQ ID NO: 12473 - DNA, 21 bp, Homo sapiens
aaccaggctgygcttcaggat

SEQ ID NO: 12474 - DNA, 21 bp, Homo sapiens
tctttctactrtcatgcccca

SEQ ID NO: 12475 - DNA, 21 bp, Homo sapiens
tccctattgamgtccgagttg

SEQ ID NO: 12476 - DNA, 21 bp, Homo sapiens
tttttattgcrgtatatttgg

SEQ ID NO: 12477 - DNA, 21 bp, Homo sapiens
tgtgtatatcstctctcgtta

SEQ ID NO: 12478 - DNA, 21 bp, Homo sapiens
ttacagtctcytacaactaat

SEQ ID NO: 12479 - DNA, 21 bp, Homo sapiens
ggctagagctwaagcctgtaa

SEQ ID NO: 12480 - DNA, 21 bp, Homo sapiens
taagaatacascctgggtaca

SEQ ID NO: 12481 - DNA, 21 bp, Homo sapiens
cacttttttgygtcagtaaag

SEQ ID NO: 12482 - DNA, 21 bp, Homo sapiens
ctaatgttagygcacaggtgc

SEQ ID NO: 12483 - DNA, 21 bp, Homo sapiens
acataattacrtcattgggaa

SEQ ID NO: 12484 - DNA, 21 bp, Homo sapiens
gaagaaagcargacttggagc

SEQ ID NO: 12485 - DNA, 21 bp, Homo sapiens
ctagttctaaygttttacctc

SEQ ID NO: 12486 - DNA, 21 bp, Homo sapiens
gagcaaagacrgtggctgtaa

SEQ ID NO: 12487 - DNA, 21 bp, Homo sapiens
caatagtatayagaaaaaaag

SEQ ID NO: 12488 - DNA, 21 bp, Homo sapiens
cacttttgttwaggttttaaa

SEQ ID NO: 12489 - DNA, 21 bp, Homo sapiens
atggcattctkccttttgttt

SEQ ID NO: 12490 - DNA, 21 bp, Homo sapiens
agcaaggctgycttccatata

SEQ ID NO: 12491 - DNA, 21 bp, Homo sapiens
cacctgaataygatcctgtct

SEQ ID NO: 12492 - DNA, 21 bp, Homo sapiens
atacaaaaackttcaaatgtt

SEQ ID NO: 12493 - DNA, 21 bp, Homo sapiens
aagtactgagrtgtattatga

SEQ ID NO: 12494 - DNA, 21 bp, Homo sapiens
ttgcagtaacwtttaggtaag

SEQ ID NO: 12495 - DNA, 21 bp, Homo sapiens
gacatatgagwtcacgtgctg

SEQ ID NO: 12496 - DNA, 21 bp, Homo sapiens
ttgccagtgtrtcagtggtta

SEQ ID NO: 12497 - DNA, 21 bp, Homo sapiens
aacacgatagygtgatttccg

SEQ ID NO: 12498 - DNA, 21 bp, Homo sapiens
gtgctacaggyacatcataaa

SEQ ID NO: 12499 - DNA, 21 bp, Homo sapiens
caaagcaggargaccataatt

SEQ ID NO: 12500 - DNA, 21 bp, Homo sapiens
actggaacccwccatctggta

SEQ ID NO: 12501 - DNA, 21 bp, Homo sapiens
ataacggtaartgaccggaat

SEQ ID NO: 12502 - DNA, 21 bp, Homo sapiens
aaatccagtcrtccttccttc

SEQ ID NO: 12503 - DNA, 21 bp, Homo sapiens
tttagctccayttaagttcat

SEQ ID NO: 12504 - DNA, 21 bp, Homo sapiens
gattatataarcctagagaat

SEQ ID NO: 12505 - DNA, 21 bp, Homo sapiens
atttttttttyacttgacgta

SEQ ID NO: 12506 - DNA, 21 bp, Homo sapiens
acaggcagagmtgcaccattg

SEQ ID NO: 12507 - DNA, 21 bp, Homo sapiens
cgcccagtgcrtctggtcctg

SEQ ID NO: 12508 - DNA, 21 bp, Homo sapiens
atattttaagsaaggactgga

SEQ ID NO: 12509 - DNA, 21 bp, Homo sapiens
aggtagttctyccatgtgtcc

SEQ ID NO: 12510 - DNA, 21 bp, Homo sapiens
gacaatgaatrtagttgttaa

SEQ ID NO: 12511 - DNA, 21 bp, Homo sapiens
atatatgaaaygaagcacctg

SEQ ID NO: 12512 - DNA, 21 bp, Homo sapiens
caggagcagamgccaagacag

SEQ ID NO: 12513 - DNA, 21 bp, Homo sapiens
taattaggagyattttataga

SEQ ID NO: 12514 - DNA, 21 bp, Homo sapiens
tcacttgtagmatggggaagt

SEQ ID NO: 12515 - DNA, 21 bp, Homo sapiens
actttgaaaarttactttgcc

SEQ ID NO: 12516 - DNA, 21 bp, Homo sapiens
acaaagcctaycttgttcttt

SEQ ID NO: 12517 - DNA, 21 bp, Homo sapiens
atagaaatttrtgagcttctt

SEQ ID NO: 12518 - DNA, 21 bp, Homo sapiens
agaaaatcaargttgggagag

SEQ ID NO: 12519 - DNA, 21 bp, Homo sapiens
taaagacctayaattcagcct

SEQ ID NO: 12520 - DNA, 21 bp, Homo sapiens
caaagttattkagaatctgac

SEQ ID NO: 12521 - DNA, 21 bp, Homo sapiens
aagttctcttrtttgttgatt

SEQ ID NO: 12522 - DNA, 21 bp, Homo sapiens
ggagtcaccayaggggcaaga

SEQ ID NO: 12523 - DNA, 21 bp, Homo sapiens
ttcaactctgygctttaggga

SEQ ID NO: 12524 - DNA, 21 bp, Homo sapiens
gcaattagcayattgttcaat

SEQ ID NO: 12525 - DNA, 21 bp, Homo sapiens
acatctcttcytgtttaatga

SEQ ID NO: 12526 - DNA, 21 bp, Homo sapiens
tatttctgtcwgatggtgagt

SEQ ID NO: 12527 - DNA, 21 bp, Homo sapiens
acgattcctcrttaacagggc

SEQ ID NO: 12528 - DNA, 21 bp, Homo sapiens
gttccttctcrtcatcagcag

SEQ ID NO: 12529 - DNA, 21 bp, Homo sapiens
aaatcagaaartcctgtgttc

SEQ ID NO: 12530 - DNA, 21 bp, Homo sapiens
ttccccactcraactcagacg

SEQ ID NO: 12531 - DNA, 21 bp, Homo sapiens
ggacaggtgcwgtagttttat

SEQ ID NO: 12532 - DNA, 21 bp, Homo sapiens
aaatgccacarttggtggatt

SEQ ID NO: 12533 - DNA, 21 bp, Homo sapiens
gagcccatgartagcgaactc

SEQ ID NO: 12534 - DNA, 21 bp, Homo sapiens
cagcttccttrtctgtcaaac

SEQ ID NO: 12535 - DNA, 21 bp, Homo sapiens
tacactagggyagaatatttg

SEQ ID NO: 12536 - DNA, 21 bp, Homo sapiens
atcaattcgcrtatctgcaaa

SEQ ID NO: 12537 - DNA, 21 bp, Homo sapiens
tggaattgatkgtggcccaaa

SEQ ID NO: 12538 - DNA, 21 bp, Homo sapiens
ttctaagagcratcaaaaacc

SEQ ID NO: 12539 - DNA, 21 bp, Homo sapiens
acatactgctrgcttatagtc

SEQ ID NO: 12540 - DNA, 21 bp, Homo sapiens
tggagcttccrtctaactcca

SEQ ID NO: 12541 - DNA, 21 bp, Homo sapiens
catcactcaasacatcagctt

SEQ ID NO: 12542 - DNA, 21 bp, Homo sapiens
cctggggctcrcgttcagtac

SEQ ID NO: 12543 - DNA, 21 bp, Homo sapiens
ccctaatgccraggatgtcca

SEQ ID NO: 12544 - DNA, 21 bp, Homo sapiens
tctttgtaccrtattgccctt

SEQ ID NO: 12545 - DNA, 21 bp, Homo sapiens
gtatcaaatayctttccagca

SEQ ID NO: 12546 - DNA, 21 bp, Homo sapiens
tcttctagatraggcattaag

SEQ ID NO: 12547 - DNA, 21 bp, Homo sapiens
aatatgaacaygttaagatgt

SEQ ID NO: 12548 - DNA, 21 bp, Homo sapiens
gagcacattgyttttgtatta

SEQ ID NO: 12549 - DNA, 21 bp, Homo sapiens
aagcaaaatayacagaaacat

SEQ ID NO: 12550 - DNA, 21 bp, Homo sapiens
ctatattttgrtttaagttga

SEQ ID NO: 12551 - DNA, 21 bp, Homo sapiens
tttttggcccrtgtgggaagg

SEQ ID NO: 12552 - DNA, 21 bp, Homo sapiens
tgagttttccrttccactaca

SEQ ID NO: 12553 - DNA, 21 bp, Homo sapiens
cagtaatggtrttttggatga

SEQ ID NO: 12554 - DNA, 21 bp, Homo sapiens
catgctagccrctggatatac

SEQ ID NO: 12555 - DNA, 21 bp, Homo sapiens
ctgggggcatrttctataaag

SEQ ID NO: 12556 - DNA, 21 bp, Homo sapiens
tctcaaagacrgacgtaatgc

SEQ ID NO: 12557 - DNA, 21 bp, Homo sapiens
tgagggctcaracatgtggag

SEQ ID NO: 12558 - DNA, 21 bp, Homo sapiens
atgtttccacrtgtatcctac

SEQ ID NO: 12559 - DNA, 21 bp, Homo sapiens
atcctctcacrgtggacagaa

SEQ ID NO: 12560 - DNA, 21 bp, Homo sapiens
aattttgtatragaaaatgac

SEQ ID NO: 12561 - DNA, 21 bp, Homo sapiens
tcgcaagagasagtttttgca

SEQ ID NO: 12562 - DNA, 21 bp, Homo sapiens
aaatttttcaygtgacaaatt

SEQ ID NO: 12563 - DNA, 21 bp, Homo sapiens
gaatcagatgyttgccagaca

SEQ ID NO: 12564 - DNA, 21 bp, Homo sapiens
ggagattgccygcctactggc

SEQ ID NO: 12565 - DNA, 21 bp, Homo sapiens
gtccacaaaaytgggagaggc

SEQ ID NO: 12566 - DNA, 21 bp, Homo sapiens
cgagaagtcgycactggaaat

SEQ ID NO: 12567 - DNA, 21 bp, Homo sapiens
ccccttcctaytctgatcctg

SEQ ID NO: 12568 - DNA, 21 bp, Homo sapiens
atggctccttrtttcctgctg

SEQ ID NO: 12569 - DNA, 21 bp, Homo sapiens
gatatcaaggygccttaagac

SEQ ID NO: 12570 - DNA, 21 bp, Homo sapiens
agttatggagsccagggtcac

SEQ ID NO: 12571 - DNA, 21 bp, Homo sapiens
aaacatgggtmaaaaatgcac

SEQ ID NO: 12572 - DNA, 21 bp, Homo sapiens
cagaaggctaraacaggaagg

SEQ ID NO: 12573 - DNA, 21 bp, Homo sapiens
aaacttaaacrcccagtcact

SEQ ID NO: 12574 - DNA, 21 bp, Homo sapiens
cagtttccaamagatgcctta

SEQ ID NO: 12575 - DNA, 21 bp, Homo sapiens
gtgattctcartaagtacagc

SEQ ID NO: 12576 - DNA, 21 bp, Homo sapiens
gatacaaatartagctatcat

SEQ ID NO: 12577 - DNA, 21 bp, Homo sapiens
taaattttctktatgttcatt

SEQ ID NO: 12578 - DNA, 21 bp, Homo sapiens
tgtgacacttraatgtagctt

SEQ ID NO: 12579 - DNA, 21 bp, Homo sapiens
gagtagaacartctgtgtttt

SEQ ID NO: 12580 - DNA, 21 bp, Homo sapiens
cctgcagtatsagaacagtac

SEQ ID NO: 12581 - DNA, 21 bp, Homo sapiens
gaatacttttygtgagagaat

SEQ ID NO: 12582 - DNA, 21 bp, Homo sapiens
aaattgaacaytaaaatgtat

SEQ ID NO: 12583 - DNA, 21 bp, Homo sapiens
aacttaatacrtgcccaactt

SEQ ID NO: 12584 - DNA, 21 bp, Homo sapiens
gagacaggagmagggggcctg

SEQ ID NO: 12585 - DNA, 21 bp, Homo sapiens
tgattcgctargcagctgttg

SEQ ID NO: 12586 - DNA, 21 bp, Homo sapiens
cttttccagaygctgtacttg

SEQ ID NO: 12587 - DNA, 21 bp, Homo sapiens
tcctggctggstttatcagat

SEQ ID NO: 12588 - DNA, 21 bp, Homo sapiens
tcctgggaggygagagaggag

SEQ ID NO: 12589 - DNA, 21 bp, Homo sapiens
gcagaggcctsgtcccacagt

SEQ ID NO: 12590 - DNA, 21 bp, Homo sapiens
tttacagttayatttgactac

SEQ ID NO: 12591 - DNA, 21 bp, Homo sapiens
tgactagattyttctcccctg

SEQ ID NO: 12592 - DNA, 21 bp, Homo sapiens
ctgctttacaratgaagtgac

SEQ ID NO: 12593 - DNA, 21 bp, Homo sapiens
gagaaaggagkattttatttc

SEQ ID NO: 12594 - DNA, 21 bp, Homo sapiens
agagggaagtyagttccaatg

SEQ ID NO: 12595 - DNA, 21 bp, Homo sapiens
taagattggaraccaaatgtc

SEQ ID NO: 12596 - DNA, 21 bp, Homo sapiens
atgtgactaasaacgggcggt

SEQ ID NO: 12597 - DNA, 21 bp, Homo sapiens
gcagtttaggratgagagaaa

SEQ ID NO: 12598 - DNA, 21 bp, Homo sapiens
attcttcttaygtggaagacc

SEQ ID NO: 12599 - DNA, 21 bp, Homo sapiens
gctaagggtgkgcaactttat

SEQ ID NO: 12600 - DNA, 21 bp, Homo sapiens
gtatcaccagyttaatgttga

SEQ ID NO: 12601 - DNA, 21 bp, Homo sapiens
tatctgtgtckccacaacctt

SEQ ID NO: 12602 - DNA, 21 bp, Homo sapiens
tcttctcctayttttttttac

SEQ ID NO: 12603 - DNA, 21 bp, Homo sapiens
cctttctcccrtgaggcatgc

SEQ ID NO: 12604 - DNA, 21 bp, Homo sapiens
tggtaataagytgacttgaac

SEQ ID NO: 12605 - DNA, 21 bp, Homo sapiens
ggtcatttttytgctagggag

SEQ ID NO: 12606 - DNA, 21 bp, Homo sapiens
atagacagtaraaaaataaat

SEQ ID NO: 12607 - DNA, 21 bp, Homo sapiens
atcaagtgtgygtatgtgtgc

SEQ ID NO: 12608 - DNA, 21 bp, Homo sapiens
gtaagtcagarcccctctgtg

SEQ ID NO: 12609 - DNA, 21 bp, Homo sapiens
tggaagccagwttgatatgcg

SEQ ID NO: 12610 - DNA, 21 bp, Homo sapiens
taaatacctcygagacttaat

SEQ ID NO: 12611 - DNA, 21 bp, Homo sapiens
tctttgatttyatgaaaaccc

SEQ ID NO: 12612 - DNA, 21 bp, Homo sapiens
aggagtaaatyggagaaaaca

SEQ ID NO: 12613 - DNA, 21 bp, Homo sapiens
tcaaaggtagrcccatttatt

SEQ ID NO: 12614 - DNA, 21 bp, Homo sapiens
tctgtgaacamaccagatggg

SEQ ID NO: 12615 - DNA, 21 bp, Homo sapiens
ccttttcaatygtaggtaaga

SEQ ID NO: 12616 - DNA, 21 bp, Homo sapiens
ctttaaaaaawtttctgattt

SEQ ID NO: 12617 - DNA, 21 bp, Homo sapiens
actagtgcacracactttacc

SEQ ID NO: 12618 - DNA, 21 bp, Homo sapiens
aaagttcaaawaaaaccaact

SEQ ID NO: 12619 - DNA, 21 bp, Homo sapiens
agtgagatttsagtcgtgtct

SEQ ID NO: 12620 - DNA, 21 bp, Homo sapiens
tctccccagckgtccaagtag

SEQ ID NO: 12621 - DNA, 21 bp, Homo sapiens
ggcagcacccrgttggttccc

SEQ ID NO: 12622 - DNA, 21 bp, Homo sapiens
gggtcccctgstggcaagtaa

SEQ ID NO: 12623 - DNA, 21 bp, Homo sapiens
aggaggataarctgtttttgc

SEQ ID NO: 12624 - DNA, 21 bp, Homo sapiens
tcagagagagygtgaggtaga

SEQ ID NO: 12625 - DNA, 21 bp, Homo sapiens
acttattcttrtacatctatt

SEQ ID NO: 12626 - DNA, 21 bp, Homo sapiens
tttcttaatcmaagccttcac

SEQ ID NO: 12627 - DNA, 21 bp, Homo sapiens
tatcagaatcraattataaaa

SEQ ID NO: 12628 - DNA, 21 bp, Homo sapiens
taaaatggcarcaggcacgcc

SEQ ID NO: 12629 - DNA, 21 bp, Homo sapiens
gtttacccacsatggccttca

SEQ ID NO: 12630 - DNA, 21 bp, Homo sapiens
acttacattckcaggactctg

SEQ ID NO: 12631 - DNA, 21 bp, Homo sapiens
gggaacagcaygaaccccaga

SEQ ID NO: 12632 - DNA, 21 bp, Homo sapiens
gaacattctgrtagttgccag

SEQ ID NO: 12633 - DNA, 21 bp, Homo sapiens
tatcaagttgytagagactca

SEQ ID NO: 12634 - DNA, 21 bp, Homo sapiens
cagggtagatkgctcaagtgt

SEQ ID NO: 12635 - DNA, 21 bp, Homo sapiens
acttgcagtcrtaaagggtta

SEQ ID NO: 12636 - DNA, 21 bp, Homo sapiens
agcagcagcgscggtggtaca

SEQ ID NO: 12637 - DNA, 21 bp, Homo sapiens
tctcaccttcmttcttcatga

SEQ ID NO: 12638 - DNA, 21 bp, Homo sapiens
agattaactgsgtcaaaagtt

SEQ ID NO: 12639 - DNA, 21 bp, Homo sapiens
atctttctaaytcactgggtc

SEQ ID NO: 12640 - DNA, 21 bp, Homo sapiens
cattctagctstatttgggtg

SEQ ID NO: 12641 - DNA, 21 bp, Homo sapiens
tgctgccctgracatgactgt

SEQ ID NO: 12642 - DNA, 21 bp, Homo sapiens
aatctttatcygtcttaagga

SEQ ID NO: 12643 - DNA, 21 bp, Homo sapiens
tcacatcataygagagagaga

SEQ ID NO: 12644 - DNA, 21 bp, Homo sapiens
ctatcagcagwgtcattatac

SEQ ID NO: 12645 - DNA, 21 bp, Homo sapiens
ggaggaagatytatctcttgc

SEQ ID NO: 12646 - DNA, 21 bp, Homo sapiens
tggcatccggyttgattttac

SEQ ID NO: 12647 - DNA, 21 bp, Homo sapiens
agaaaaaaaamcttccagaag

SEQ ID NO: 12648 - DNA, 21 bp, Homo sapiens
ctttctatttmacagctatct

SEQ ID NO: 12649 - DNA, 21 bp, Homo sapiens
actctaagaaraagacacttc

SEQ ID NO: 12650 - DNA, 21 bp, Homo sapiens
aaattcctatraaaaagtttt

SEQ ID NO: 12651 - DNA, 21 bp, Homo sapiens
atatataaacrcccacctgca

SEQ ID NO: 12652 - DNA, 21 bp, Homo sapiens
gagcccaagtscctactagaa

SEQ ID NO: 12653 - DNA, 21 bp, Homo sapiens
aacaagtctaytgctccattc

SEQ ID NO: 12654 - DNA, 21 bp, Homo sapiens
gtttttcacaytgctcttact

SEQ ID NO: 12655 - DNA, 21 bp, Homo sapiens
agaaggaagtygagctcatac

SEQ ID NO: 12656 - DNA, 21 bp, Homo sapiens
tgacagccttscagttcagtt

SEQ ID NO: 12657 - DNA, 21 bp, Homo sapiens
tggtttttaargatttattag

SEQ ID NO: 12658 - DNA, 21 bp, Homo sapiens
aaccacaccascatgcgaacc

SEQ ID NO: 12659 - DNA, 21 bp, Homo sapiens
ctaacaataakagctgtcatt

SEQ ID NO: 12660 - DNA, 21 bp, Homo sapiens
cctaatgcctytccagtgttc

SEQ ID NO: 12661 - DNA, 21 bp, Homo sapiens
ttctccatacrcataatttcc

SEQ ID NO: 12662 - DNA, 21 bp, Homo sapiens
gtgatgtgatraaacaaactt

SEQ ID NO: 12663 - DNA, 21 bp, Homo sapiens
aacacatcccrtcttcactat

SEQ ID NO: 12664 - DNA, 21 bp, Homo sapiens
catataaaacraagaaaaaat

SEQ ID NO: 12665 - DNA, 21 bp, Homo sapiens
atatcacagartcactatggg

SEQ ID NO: 12666 - DNA, 21 bp, Homo sapiens
cattcaactamagaattcatg

SEQ ID NO: 12667 - DNA, 21 bp, Homo sapiens
agtttcatatktctatgtgtt

SEQ ID NO: 12668 - DNA, 21 bp, Homo sapiens
ggtcaggcaarcacacctatt

SEQ ID NO: 12669 - DNA, 21 bp, Homo sapiens
ggcacagttawcagaaagtgc

SEQ ID NO: 12670 - DNA, 21 bp, Homo sapiens
tctgctttgcrtttgctcaga

SEQ ID NO: 12671 - DNA, 21 bp, Homo sapiens
gaggctttttwtttggtgtcc

SEQ ID NO: 12672 - DNA, 21 bp, Homo sapiens
ctagtgcatcmctttgtgtta

SEQ ID NO: 12673 - DNA, 21 bp, Homo sapiens
gtggaaagccygcatggtgtt

SEQ ID NO: 12674 - DNA, 21 bp, Homo sapiens
gcatcagagcygcctttcagt

SEQ ID NO: 12675 - DNA, 21 bp, Homo sapiens
gagcgggtagrcattagaact

SEQ ID NO: 12676 - DNA, 21 bp, Homo sapiens
gatgatcagcyagatttggca

SEQ ID NO: 12677 - DNA, 21 bp, Homo sapiens
ggcccaggaaygccagattat

SEQ ID NO: 12678 - DNA, 21 bp, Homo sapiens
atgcatatacstaatagtaag

SEQ ID NO: 12679 - DNA, 21 bp, Homo sapiens
gaggaagccckggaattatac

SEQ ID NO: 12680 - DNA, 21 bp, Homo sapiens
cagtgagcagrgaaactaagc

SEQ ID NO: 12681 - DNA, 21 bp, Homo sapiens
tataaagcatygtatgaattc

SEQ ID NO: 12682 - DNA, 21 bp, Homo sapiens
agtgggctggkctaatgactg

SEQ ID NO: 12683 - DNA, 21 bp, Homo sapiens
agaaaattgcrttgtttcata

SEQ ID NO: 12684 - DNA, 21 bp, Homo sapiens
aggaattctcrtaatgtggcg

SEQ ID NO: 12685 - DNA, 21 bp, Homo sapiens
tttgatctccyacacaactta

SEQ ID NO: 12686 - DNA, 21 bp, Homo sapiens
ggcaaatccayagttctgcta

SEQ ID NO: 12687 - DNA, 21 bp, Homo sapiens
ctgagggaaartctataagaa

SEQ ID NO: 12688 - DNA, 21 bp, Homo sapiens
ccatacttcawttcttacctg

SEQ ID NO: 12689 - DNA, 21 bp, Homo sapiens
cagaggtgctsacttaactcc

SEQ ID NO: 12690 - DNA, 21 bp, Homo sapiens
tagaaggatartacttttttg

SEQ ID NO: 12691 - DNA, 21 bp, Homo sapiens
tccctggaagyaaactgccca

SEQ ID NO: 12692 - DNA, 21 bp, Homo sapiens
aatgacaggtyagacacacta

SEQ ID NO: 12693 - DNA, 21 bp, Homo sapiens
cctactgaacwgcattagtca

SEQ ID NO: 12694 - DNA, 21 bp, Homo sapiens
aaatccctacyaccctccact

SEQ ID NO: 12695 - DNA, 21 bp, Homo sapiens
cataatccttrgctttggtaa

SEQ ID NO: 12696 - DNA, 21 bp, Homo sapiens
gaacttcatgraataatacaa

SEQ ID NO: 12697 - DNA, 21 bp, Homo sapiens
aaagactagayatgatttcct

SEQ ID NO: 12698 - DNA, 21 bp, Homo sapiens
tgcttcttacrcgcttcacat

SEQ ID NO: 12699 - DNA, 21 bp, Homo sapiens
tagatgacttyaggagctgga

SEQ ID NO: 12700 - DNA, 21 bp, Homo sapiens
atcaggaagtmtgtcatgtgt

SEQ ID NO: 12701 - DNA, 21 bp, Homo sapiens
tgagttcaaargaaaagcaat

SEQ ID NO: 12702 - DNA, 21 bp, Homo sapiens
gctctcattgyggtattcatg

SEQ ID NO: 12703 - DNA, 21 bp, Homo sapiens
ttttgctttcrgagagtttca

SEQ ID NO: 12704 - DNA, 21 bp, Homo sapiens
ataataccaayatcctgaaat

SEQ ID NO: 12705 - DNA, 21 bp, Homo sapiens
cacctatgatygctttttcct

SEQ ID NO: 12706 - DNA, 21 bp, Homo sapiens
tttaattgtcrtcttcgtgga

SEQ ID NO: 12707 - DNA, 21 bp, Homo sapiens
atgaacaatgygtgtgctgta

SEQ ID NO: 12708 - DNA, 21 bp, Homo sapiens
gcatcttctgrgcgccccctt

SEQ ID NO: 12709 - DNA, 21 bp, Homo sapiens
cacttggtttmtactaagagt

SEQ ID NO: 12710 - DNA, 21 bp, Homo sapiens
cagcaagcgaraatctccaga

SEQ ID NO: 12711 - DNA, 21 bp, Homo sapiens
tgccaggcccygagtttcttt

SEQ ID NO: 12712 - DNA, 21 bp, Homo sapiens
cctaattcccrccttctatgc

SEQ ID NO: 12713 - DNA, 21 bp, Homo sapiens
ttaaaaagctsggaagaaaat

SEQ ID NO: 12714 - DNA, 21 bp, Homo sapiens
tatgaaagaayggtctaggga

SEQ ID NO: 12715 - DNA, 21 bp, Homo sapiens
tgtagacaatraagagatggt

SEQ ID NO: 12716 - DNA, 21 bp, Homo sapiens
gctgcaaagtrtagaatctct

SEQ ID NO: 12717 - DNA, 21 bp, Homo sapiens
cttgttgaacraactaaatga

SEQ ID NO: 12718 - DNA, 21 bp, Homo sapiens
ccatttgttcrtgcgatccaa

SEQ ID NO: 12719 - DNA, 21 bp, Homo sapiens
tctatttctgscttttatttt

SEQ ID NO: 12720 - DNA, 21 bp, Homo sapiens
ttaatttattygagcctactt

SEQ ID NO: 12721 - DNA, 21 bp, Homo sapiens
tgggaaaatayaccaacacag

SEQ ID NO: 12722 - DNA, 21 bp, Homo sapiens
taggaaagtgkgaatagaaga

SEQ ID NO: 12723 - DNA, 21 bp, Homo sapiens
ctagatgcccrtgaaagcttc

SEQ ID NO: 12724 - DNA, 21 bp, Homo sapiens
agaaaccatcragtggaattg

SEQ ID NO: 12725 - DNA, 21 bp, Homo sapiens
gaggcattttrtacacttttc

SEQ ID NO: 12726 - DNA, 21 bp, Homo sapiens
caatagcaccyatatgcaagc

SEQ ID NO: 12727 - DNA, 21 bp, Homo sapiens
ttgtattttasatctgcagaa

SEQ ID NO: 12728 - DNA, 21 bp, Homo sapiens
tgaattttagkttggcaaaga

SEQ ID NO: 12729 - DNA, 21 bp, Homo sapiens
agagtgacagsctgaagaatc

SEQ ID NO: 12730 - DNA, 21 bp, Homo sapiens
ttgtcagtgargaaggaaagg

SEQ ID NO: 12731 - DNA, 21 bp, Homo sapiens
ggacatgctcrtctcttctct

SEQ ID NO: 12732 - DNA, 21 bp, Homo sapiens
gtgaaatagamcttgtgcagt

SEQ ID NO: 12733 - DNA, 21 bp, Homo sapiens
ttgttagttayccacgtcctc

SEQ ID NO: 12734 - DNA, 21 bp, Homo sapiens
tgttcgaaccmagcattttgg

SEQ ID NO: 12735 - DNA, 21 bp, Homo sapiens
caaatgacacrggtaacttga

SEQ ID NO: 12736 - DNA, 21 bp, Homo sapiens
caccaatttcstttttctcag

SEQ ID NO: 12737 - DNA, 21 bp, Homo sapiens
aggaggtacayagcttgatgg

SEQ ID NO: 12738 - DNA, 21 bp, Homo sapiens
ctggttttatytcccctcaca

SEQ ID NO: 12739 - DNA, 21 bp, Homo sapiens
attcagtgcarttgtggatct

SEQ ID NO: 12740 - DNA, 21 bp, Homo sapiens
atggagttagrgatggaaaaa

SEQ ID NO: 12741 - DNA, 21 bp, Homo sapiens
gaaaccccgtrcttccaccga

SEQ ID NO: 12742 - DNA, 21 bp, Homo sapiens
acaggttagtrgttcaccatt

SEQ ID NO: 12743 - DNA, 21 bp, Homo sapiens
gtgatttctcyttctatccta

SEQ ID NO: 12744 - DNA, 21 bp, Homo sapiens
cagctttatcmctcaacccct

SEQ ID NO: 12745 - DNA, 21 bp, Homo sapiens
taaaatgatawtctcataatt

SEQ ID NO: 12746 - DNA, 21 bp, Homo sapiens
ggcactacatwtttccaaggt

SEQ ID NO: 12747 - DNA, 21 bp, Homo sapiens
gccttgctcayagccaactct

SEQ ID NO: 12748 - DNA, 21 bp, Homo sapiens
catccattacmgagggtctaa

SEQ ID NO: 12749 - DNA, 21 bp, Homo sapiens
cttaatgccayaagatgatct

SEQ ID NO: 12750 - DNA, 21 bp, Homo sapiens
gattagcagcrttccttcatt

SEQ ID NO: 12751 - DNA, 21 bp, Homo sapiens
tttaggtcccygagagcaatg

SEQ ID NO: 12752 - DNA, 21 bp, Homo sapiens
atcaaaaggcragacaatatc

SEQ ID NO: 12753 - DNA, 21 bp, Homo sapiens
tgacaaggtcmgtagcttcaa

SEQ ID NO: 12754 - DNA, 21 bp, Homo sapiens
ctttctatttytcaggcagca

SEQ ID NO: 12755 - DNA, 21 bp, Homo sapiens
cgtttactagyctcagtcact

SEQ ID NO: 12756 - DNA, 21 bp, Homo sapiens
tctgtgtttaygaactcttac

SEQ ID NO: 12757 - DNA, 21 bp, Homo sapiens
agtggtaggtrgtagaaacac

SEQ ID NO: 12758 - DNA, 21 bp, Homo sapiens
cgtctcttccrtccctctcta

SEQ ID NO: 12759 - DNA, 21 bp, Homo sapiens
aaaagcagttygatcgactgg

SEQ ID NO: 12760 - DNA, 21 bp, Homo sapiens
tgggacaggayagtgaggcag

SEQ ID NO: 12761 - DNA, 21 bp, Homo sapiens
gttagaattcktctcaaggct

SEQ ID NO: 12762 - DNA, 21 bp, Homo sapiens
aggaactgatsactgctgcag

SEQ ID NO: 12763 - DNA, 21 bp, Homo sapiens
tcattggctakgtacttttct

SEQ ID NO: 12764 - DNA, 21 bp, Homo sapiens
agttcttatcrtccacatgga

SEQ ID NO: 12765 - DNA, 21 bp, Homo sapiens
tggtgcccatrgccaatctaa

SEQ ID NO: 12766 - DNA, 21 bp, Homo sapiens
ctgaagaccaratgattgcat

SEQ ID NO: 12767 - DNA, 21 bp, Homo sapiens
tgtttgtcaargtaaatggtg

SEQ ID NO: 12768 - DNA, 21 bp, Homo sapiens
ctcatctgttktcctgggatg

SEQ ID NO: 12769 - DNA, 21 bp, Homo sapiens
aaatataaatkgtccttgctc

SEQ ID NO: 12770 - DNA, 21 bp, Homo sapiens
gaggggaaaaygctgcattag

SEQ ID NO: 12771 - DNA, 21 bp, Homo sapiens
aggagcaaatraaccctggac

SEQ ID NO: 12772 - DNA, 21 bp, Homo sapiens
gcttcagccartttccttttc

SEQ ID NO: 12773 - DNA, 21 bp, Homo sapiens
ccagaggcgaycacgtgaaag

SEQ ID NO: 12774 - DNA, 21 bp, Homo sapiens
gaaccacggcmcaagtcattg

SEQ ID NO: 12775 - DNA, 21 bp, Homo sapiens
ttcttgttggytttaaggaaa

SEQ ID NO: 12776 - DNA, 21 bp, Homo sapiens
ttcaatacagsaaaactgtgt

SEQ ID NO: 12777 - DNA, 21 bp, Homo sapiens
acctccagtargaaacaacct

SEQ ID NO: 12778 - DNA, 21 bp, Homo sapiens
taatgagttaragaccatatg

SEQ ID NO: 12779 - DNA, 21 bp, Homo sapiens
caactgccctktaaaaagctc

SEQ ID NO: 12780 - DNA, 21 bp, Homo sapiens
taagatcagcrgtctattaat

SEQ ID NO: 12781 - DNA, 21 bp, Homo sapiens
tccatggttgrgcgtgttggg

SEQ ID NO: 12782 - DNA, 21 bp, Homo sapiens
atgattatatktggcaaagcc

SEQ ID NO: 12783 - DNA, 21 bp, Homo sapiens
tacatcctgtwaaaattcact

SEQ ID NO: 12784 - DNA, 21 bp, Homo sapiens
attggaacccsaagtctggaa

SEQ ID NO: 12785 - DNA, 21 bp, Homo sapiens
tagtatgcaamatggaatgaa

SEQ ID NO: 12786 - DNA, 21 bp, Homo sapiens
tactacattgytaaggcttaa

SEQ ID NO: 12787 - DNA, 21 bp, Homo sapiens
tgacatctgcrtaataggctg

SEQ ID NO: 12788 - DNA, 21 bp, Homo sapiens
cacactatacycgtagttctg

SEQ ID NO: 12789 - DNA, 21 bp, Homo sapiens
gcttagtgaaygctttgtttt

SEQ ID NO: 12790 - DNA, 21 bp, Homo sapiens
tctattacttwgttgtgggta

SEQ ID NO: 12791 - DNA, 21 bp, Homo sapiens
gggccagattktgtagagtgt

SEQ ID NO: 12792 - DNA, 21 bp, Homo sapiens
tgcctgtctgyggatacacct

SEQ ID NO: 12793 - DNA, 21 bp, Homo sapiens
aggtgaaagamgcaccatgta

SEQ ID NO: 12794 - DNA, 21 bp, Homo sapiens
tatggtatatyttcaaaactc

SEQ ID NO: 12795 - DNA, 21 bp, Homo sapiens
agactgtgctkcttaaggtca

SEQ ID NO: 12796 - DNA, 21 bp, Homo sapiens
ccggctccgcrggcaggagga

SEQ ID NO: 12797 - DNA, 21 bp, Homo sapiens
gagtcggaatmaggttaattc

SEQ ID NO: 12798 - DNA, 21 bp, Homo sapiens
caggtgttgcrttatataata

SEQ ID NO: 12799 - DNA, 21 bp, Homo sapiens
catggcctggsattggaattg

SEQ ID NO: 12800 - DNA, 21 bp, Homo sapiens
actgagatcartttggtcgtc

SEQ ID NO: 12801 - DNA, 21 bp, Homo sapiens
aaaaaaacttycaataatgca

SEQ ID NO: 12802 - DNA, 21 bp, Homo sapiens
tgtctgccacygttagtccat

SEQ ID NO: 12803 - DNA, 21 bp, Homo sapiens
ataggttcatrtgtggtgtag

SEQ ID NO: 12804 - DNA, 21 bp, Homo sapiens
tcagaggcagkttgaggtact

SEQ ID NO: 12805 - DNA, 21 bp, Homo sapiens
cctaaggagayggatataacc

SEQ ID NO: 12806 - DNA, 21 bp, Homo sapiens
ctgggtcccakagatgattcc

SEQ ID NO: 12807 - DNA, 21 bp, Homo sapiens
cttcttaaaasaggtgtttca

SEQ ID NO: 12808 - DNA, 21 bp, Homo sapiens
ccaatgtaacraatatgtatg

SEQ ID NO: 12809 - DNA, 21 bp, Homo sapiens
ccataaatctrggtaacattc

SEQ ID NO: 12810 - DNA, 21 bp, Homo sapiens
aattaaggcascagggaaggc

SEQ ID NO: 12811 - DNA, 21 bp, Homo sapiens
tccaaattccktttccctagt

SEQ ID NO: 12812 - DNA, 21 bp, Homo sapiens
gcttcccttarcacacaattg

SEQ ID NO: 12813 - DNA, 21 bp, Homo sapiens
cctgagaaatrcgtgtcagtg

SEQ ID NO: 12814 - DNA, 21 bp, Homo sapiens
aatcatccttktcatctcttt

SEQ ID NO: 12815 - DNA, 21 bp, Homo sapiens
cctctctcctmccattcacag

SEQ ID NO: 12816 - DNA, 21 bp, Homo sapiens
gatggcatacyacgaatttta

SEQ ID NO: 12817 - DNA, 21 bp, Homo sapiens
gctattgtgarcttcaagtga

SEQ ID NO: 12818 - DNA, 21 bp, Homo sapiens
atgccaagctrctatcactgg

SEQ ID NO: 12819 - DNA, 21 bp, Homo sapiens
catcaaacacmatctttgaaa

SEQ ID NO: 12820 - DNA, 21 bp, Homo sapiens
tttttaagacktcaccaaatg

SEQ ID NO: 12821 - DNA, 21 bp, Homo sapiens
ttatctttcayctggattcct

SEQ ID NO: 12822 - DNA, 21 bp, Homo sapiens
cctttcattcrgtgataatgg

SEQ ID NO: 12823 - DNA, 21 bp, Homo sapiens
gattttcccayacttttgaaa

SEQ ID NO: 12824 - DNA, 21 bp, Homo sapiens
atttctaaaaytccagactta

SEQ ID NO: 12825 - DNA, 21 bp, Homo sapiens
agtgcagggtrtattcatgcc

SEQ ID NO: 12826 - DNA, 21 bp, Homo sapiens
ttggactctarttatgaaaaa

SEQ ID NO: 12827 - DNA, 21 bp, Homo sapiens
cctctaatagytcctcgccat

SEQ ID NO: 12828 - DNA, 21 bp, Homo sapiens
cagcctttatyactcctgttt

SEQ ID NO: 12829 - DNA, 21 bp, Homo sapiens
gagaaatctaygcagctgcaa

SEQ ID NO: 12830 - DNA, 21 bp, Homo sapiens
atcactgctcygttagccatg

SEQ ID NO: 12831 - DNA, 21 bp, Homo sapiens
gggcaaattartgtgttagct

SEQ ID NO: 12832 - DNA, 21 bp, Homo sapiens
cgtgaccttgyacatgcaaaa

SEQ ID NO: 12833 - DNA, 21 bp, Homo sapiens
atactatggarccaagacata

SEQ ID NO: 12834 - DNA, 21 bp, Homo sapiens
tgaccaacaasgcctcaccat

SEQ ID NO: 12835 - DNA, 21 bp, Homo sapiens
ctataaacacraatccttcct

SEQ ID NO: 12836 - DNA, 21 bp, Homo sapiens
tctgacctgcyttccccagct

SEQ ID NO: 12837 - DNA, 21 bp, Homo sapiens
ccaactcccasaaagactgaa

SEQ ID NO: 12838 - DNA, 21 bp, Homo sapiens
ctgtaatttgraagccagagc

SEQ ID NO: 12839 - DNA, 21 bp, Homo sapiens
agaggaaagcstaagttagat

SEQ ID NO: 12840 - DNA, 21 bp, Homo sapiens
gtaccacgctraaaaatcaac

SEQ ID NO: 12841 - DNA, 21 bp, Homo sapiens
tatgaatcaaytggcattctt

SEQ ID NO: 12842 - DNA, 21 bp, Homo sapiens
cttttttgcayttgctccagt

SEQ ID NO: 12843 - DNA, 21 bp, Homo sapiens
aaccaattccrtttagagaac

SEQ ID NO: 12844 - DNA, 21 bp, Homo sapiens
aataatccatytgaaacttgg

SEQ ID NO: 12845 - DNA, 21 bp, Homo sapiens
atgcctgagakaacaagctag

SEQ ID NO: 12846 - DNA, 21 bp, Homo sapiens
tcaggattccmggtaataatc

SEQ ID NO: 12847 - DNA, 21 bp, Homo sapiens
aagggtcaggyggttaacatc

SEQ ID NO: 12848 - DNA, 21 bp, Homo sapiens
tgctgaaaccrtggaatcctc

SEQ ID NO: 12849 - DNA, 21 bp, Homo sapiens
atcaaacagaycctgatgcac

SEQ ID NO: 12850 - DNA, 21 bp, Homo sapiens
actcagcccaytgaaaacctt

SEQ ID NO: 12851 - DNA, 21 bp, Homo sapiens
gtcacaattartaataactga

SEQ ID NO: 12852 - DNA, 21 bp, Homo sapiens
aataaattacrccaggaagct

SEQ ID NO: 12853 - DNA, 21 bp, Homo sapiens
ttaggatctasttttgcaatg

SEQ ID NO: 12854 - DNA, 21 bp, Homo sapiens
atagttaccartctcaaatag

SEQ ID NO: 12855 - DNA, 21 bp, Homo sapiens
atggaaatgtwgagagtctta

SEQ ID NO: 12856 - DNA, 21 bp, Homo sapiens
agcagataccrtagggccatt

SEQ ID NO: 12857 - DNA, 21 bp, Homo sapiens
agtcttttggrtgaccccacg

SEQ ID NO: 12858 - DNA, 21 bp, Homo sapiens
tactaatctgmaggcctcctc

SEQ ID NO: 12859 - DNA, 21 bp, Homo sapiens
taaaaactttyggaaaatatc

SEQ ID NO: 12860 - DNA, 21 bp, Homo sapiens
catctctcaayagcccaagtt

SEQ ID NO: 12861 - DNA, 21 bp, Homo sapiens
ggaaaagcaayccagattgta

SEQ ID NO: 12862 - DNA, 21 bp, Homo sapiens
atgaactcatwtctgttagga

SEQ ID NO: 12863 - DNA, 21 bp, Homo sapiens
ctacatatgayggagacattt

SEQ ID NO: 12864 - DNA, 21 bp, Homo sapiens
tcccagcagcrtaagtgagca

SEQ ID NO: 12865 - DNA, 21 bp, Homo sapiens
ttgtctttgayatctgactta

SEQ ID NO: 12866 - DNA, 21 bp, Homo sapiens
tggggacaccraaccaggaca

SEQ ID NO: 12867 - DNA, 21 bp, Homo sapiens
cagagctatayggcaggcaaa

SEQ ID NO: 12868 - DNA, 21 bp, Homo sapiens
tgggaaacgcyggttttgagg

SEQ ID NO: 12869 - DNA, 21 bp, Homo sapiens
aacatctaacygtatggtcag

SEQ ID NO: 12870 - DNA, 21 bp, Homo sapiens
atgattgcagyttgagccatt

SEQ ID NO: 12871 - DNA, 21 bp, Homo sapiens
gatcagaaagratgtttttgg

SEQ ID NO: 12872 - DNA, 21 bp, Homo sapiens
ctgtattccarggtaggcact

SEQ ID NO: 12873 - DNA, 21 bp, Homo sapiens
gcaattttacmtctgtcaacg

SEQ ID NO: 12874 - DNA, 21 bp, Homo sapiens
aattagaaatkatagctcaac

SEQ ID NO: 12875 - DNA, 21 bp, Homo sapiens
gtgcaagtgargaaaagtcgc

SEQ ID NO: 12876 - DNA, 21 bp, Homo sapiens
aaagataactrtgaagctgct

SEQ ID NO: 12877 - DNA, 21 bp, Homo sapiens
gagaaaagaamttaacagcta

SEQ ID NO: 12878 - DNA, 21 bp, Homo sapiens
gaaggcccacrgatgctatct

SEQ ID NO: 12879 - DNA, 21 bp, Homo sapiens
ataaataaacyaacagccaac

SEQ ID NO: 12880 - DNA, 21 bp, Homo sapiens
gagagacactrtgtcagatgg

SEQ ID NO: 12881 - DNA, 21 bp, Homo sapiens
tagaactagayatgcactacc

SEQ ID NO: 12882 - DNA, 21 bp, Homo sapiens
tttcacagaaycgccctaccc

SEQ ID NO: 12883 - DNA, 21 bp, Homo sapiens
cacatccttcyagttgatcct

SEQ ID NO: 12884 - DNA, 21 bp, Homo sapiens
caggcaggaamcccaaagggt

SEQ ID NO: 12885 - DNA, 21 bp, Homo sapiens
tggaaacattrgcgcttacat

SEQ ID NO: 12886 - DNA, 21 bp, Homo sapiens
ccggcatcctkcttccaggtc

SEQ ID NO: 12887 - DNA, 21 bp, Homo sapiens
gtggtctcctygccacatttg

SEQ ID NO: 12888 - DNA, 21 bp, Homo sapiens
cttaaggagtragcatgttgc

SEQ ID NO: 12889 - DNA, 21 bp, Homo sapiens
tggtttggttyagctcatttt

SEQ ID NO: 12890 - DNA, 21 bp, Homo sapiens
cacaataactrtctgaagtaa

SEQ ID NO: 12891 - DNA, 21 bp, Homo sapiens
gtgcagagtcraagatcttta

SEQ ID NO: 12892 - DNA, 21 bp, Homo sapiens
tcaagggtgtktctgatgctt

SEQ ID NO: 12893 - DNA, 21 bp, Homo sapiens
gaaaatctcaytggaaccctt

SEQ ID NO: 12894 - DNA, 21 bp, Homo sapiens
tcctggcgtcsgtgtggctta

SEQ ID NO: 12895 - DNA, 21 bp, Homo sapiens
cccaatacagyggtttccgtg

SEQ ID NO: 12896 - DNA, 21 bp, Homo sapiens
aggaacgtacrtgaagcattt

SEQ ID NO: 12897 - DNA, 21 bp, Homo sapiens
ggaagagtgartgcgagtcag

SEQ ID NO: 12898 - DNA, 21 bp, Homo sapiens
gcagaccactrggaatcaaag

SEQ ID NO: 12899 - DNA, 21 bp, Homo sapiens
tccatgggtgrctcccaggca

SEQ ID NO: 12900 - DNA, 21 bp, Homo sapiens
cctttctccasggagctcagg

SEQ ID NO: 12901 - DNA, 21 bp, Homo sapiens
aatcctctccyaaaatggtgc

SEQ ID NO: 12902 - DNA, 21 bp, Homo sapiens
aataattaacwtcggcatggc

SEQ ID NO: 12903 - DNA, 21 bp, Homo sapiens
gttgtcgtcaygtcttcttaa

SEQ ID NO: 12904 - DNA, 21 bp, Homo sapiens
tccggcgagcrgtgcatccca

SEQ ID NO: 12905 - DNA, 21 bp, Homo sapiens
gagctgtgttstcccaccgtg

SEQ ID NO: 12906 - DNA, 21 bp, Homo sapiens
agggaggctcygtgccctgcg

SEQ ID NO: 12907 - DNA, 21 bp, Homo sapiens
gtttctgtctyatcgtacaat

SEQ ID NO: 12908 - DNA, 21 bp, Homo sapiens
gtatgggtgaygatccagtcc

SEQ ID NO: 12909 - DNA, 21 bp, Homo sapiens
accaccagcarcgtgtcctca

SEQ ID NO: 12910 - DNA, 21 bp, Homo sapiens
cttcatgttcyctgatcttga

SEQ ID NO: 12911 - DNA, 21 bp, Homo sapiens
cctagacccaygttgagccta

SEQ ID NO: 12912 - DNA, 21 bp, Homo sapiens
gcctattcaamaggccagttc

SEQ ID NO: 12913 - DNA, 21 bp, Homo sapiens
atgcaacagcrggatcacaac

SEQ ID NO: 12914 - DNA, 21 bp, Homo sapiens
acaggtttcartatcactaag

SEQ ID NO: 12915 - DNA, 21 bp, Homo sapiens
acatgttattyggtttggatc

SEQ ID NO: 12916 - DNA, 21 bp, Homo sapiens
tcagtgagacsctacagcaat

SEQ ID NO: 12917 - DNA, 21 bp, Homo sapiens
ttgaccaaaayagtcagggag

SEQ ID NO: 12918 - DNA, 21 bp, Homo sapiens
tgataactgaraacataagcg

SEQ ID NO: 12919 - DNA, 21 bp, Homo sapiens
cagctaccgamaatgacaggg

SEQ ID NO: 12920 - DNA, 21 bp, Homo sapiens
ccgtggctgcygcaacatccc

SEQ ID NO: 12921 - DNA, 21 bp, Homo sapiens
tgagggaagtygccccatgga

SEQ ID NO: 12922 - DNA, 21 bp, Homo sapiens
cgggctttcartccctcgctc

SEQ ID NO: 12923 - DNA, 21 bp, Homo sapiens
cacaatgtcawctgagtggcg

SEQ ID NO: 12924 - DNA, 21 bp, Homo sapiens
tgccaataagygtacttacat

SEQ ID NO: 12925 - DNA, 21 bp, Homo sapiens
tccaacactgrccaagagatt

SEQ ID NO: 12926 - DNA, 21 bp, Homo sapiens
gatctcaaatrtactcccgtt

SEQ ID NO: 12927 - DNA, 21 bp, Homo sapiens
actgcacgatytgttaattca

SEQ ID NO: 12928 - DNA, 21 bp, Homo sapiens
atttacctggygcgcatgggt

SEQ ID NO: 12929 - DNA, 21 bp, Homo sapiens
ttcttccatastgaaggtcac

SEQ ID NO: 12930 - DNA, 21 bp, Homo sapiens
ccctcactcckgtgctctggc

SEQ ID NO: 12931 - DNA, 21 bp, Homo sapiens
cattgaaaagrggaggaaaga

SEQ ID NO: 12932 - DNA, 21 bp, Homo sapiens
aagcctttttsctctctggct

SEQ ID NO: 12933 - DNA, 21 bp, Homo sapiens
tatagttctgyccatctcctc

SEQ ID NO: 12934 - DNA, 21 bp, Homo sapiens
agtactaaaaygatctattcc

SEQ ID NO: 12935 - DNA, 21 bp, Homo sapiens
agtgcctggargagtactcag

SEQ ID NO: 12936 - DNA, 21 bp, Homo sapiens
gagaagtttcrgctcaaccat

SEQ ID NO: 12937 - DNA, 21 bp, Homo sapiens
aataagatctmggtttgctgg

SEQ ID NO: 12938 - DNA, 21 bp, Homo sapiens
tccatgcaagytcagccattc

SEQ ID NO: 12939 - DNA, 21 bp, Homo sapiens
gcattgacgcraccaatatgc

SEQ ID NO: 12940 - DNA, 21 bp, Homo sapiens
atgaccacgtrtaaatatgaa

SEQ ID NO: 12941 - DNA, 21 bp, Homo sapiens
tcatagcactsataagccacc

SEQ ID NO: 12942 - DNA, 21 bp, Homo sapiens
aaggacaaatkacagagacaa

SEQ ID NO: 12943 - DNA, 21 bp, Homo sapiens
gtacttcatcraaaatacaag

SEQ ID NO: 12944 - DNA, 21 bp, Homo sapiens
atttccttccyatgatgattt

SEQ ID NO: 12945 - DNA, 21 bp, Homo sapiens
cttgttccaaragctgtttgt

SEQ ID NO: 12946 - DNA, 21 bp, Homo sapiens
acacatgatcmcaatggtaat

SEQ ID NO: 12947 - DNA, 21 bp, Homo sapiens
caagaatttcyaagaaggcca

SEQ ID NO: 12948 - DNA, 21 bp, Homo sapiens
tttacgactaygatttccagc

SEQ ID NO: 12949 - DNA, 21 bp, Homo sapiens
ttggtagtttygggtggaaat

SEQ ID NO: 12950 - DNA, 21 bp, Homo sapiens
attgcttgtckggtcattcag

SEQ ID NO: 12951 - DNA, 21 bp, Homo sapiens
cctttccggtytgcgcatccc

SEQ ID NO: 12952 - DNA, 21 bp, Homo sapiens
ggaggccccarccaaggcggg

SEQ ID NO: 12953 - DNA, 21 bp, Homo sapiens
tgggacgttaytggatacctg

SEQ ID NO: 12954 - DNA, 21 bp, Homo sapiens
actgtcagggwtacagagaaa

SEQ ID NO: 12955 - DNA, 21 bp, Homo sapiens
gcctgattgcrttccaggagg

SEQ ID NO: 12956 - DNA, 21 bp, Homo sapiens
aatgtggggaygggtggtaac

SEQ ID NO: 12957 - DNA, 21 bp, Homo sapiens
tggactgtggygggtgaaggg

SEQ ID NO: 12958 - DNA, 21 bp, Homo sapiens
gtggagaagaygggcctataa

SEQ ID NO: 12959 - DNA, 21 bp, Homo sapiens
acggtgaacayaggaaatggc

SEQ ID NO: 12960 - DNA, 21 bp, Homo sapiens
tgtaccatttrtctactgaag

SEQ ID NO: 12961 - DNA, 21 bp, Homo sapiens
tatatgtctaygaataaacac

SEQ ID NO: 12962 - DNA, 21 bp, Homo sapiens
tttattaaatsctatgctgag

SEQ ID NO: 12963 - DNA, 21 bp, Homo sapiens
aataatctacwggtgccaaaa

SEQ ID NO: 12964 - DNA, 21 bp, Homo sapiens
ttacaaaatayggatcactgg

SEQ ID NO: 12965 - DNA, 21 bp, Homo sapiens
acagggaagamtgaaaacgta

SEQ ID NO: 12966 - DNA, 21 bp, Homo sapiens
aggaaaaatasaacaagactg

SEQ ID NO: 12967 - DNA, 21 bp, Homo sapiens
catactagacmctcagtgaag

SEQ ID NO: 12968 - DNA, 21 bp, Homo sapiens
gccaagtattytgaatgcgtg

SEQ ID NO: 12969 - DNA, 21 bp, Homo sapiens
gacaagggaawgaagccaaga

SEQ ID NO: 12970 - DNA, 21 bp, Homo sapiens
tttccccatgkaatctggact

SEQ ID NO: 12971 - DNA, 21 bp, Homo sapiens
tccaaactgcyttaaatggtt

SEQ ID NO: 12972 - DNA, 21 bp, Homo sapiens
aggatgggaarttcgtgagaa

SEQ ID NO: 12973 - DNA, 21 bp, Homo sapiens
gctcagcgagygtctattgaa

SEQ ID NO: 12974 - DNA, 21 bp, Homo sapiens
atgaaccataygtgcataaaa

SEQ ID NO: 12975 - DNA, 21 bp, Homo sapiens
ttgctcttttyctagtcctcg

SEQ ID NO: 12976 - DNA, 21 bp, Homo sapiens
tttgaaaaacmgttccaccat

SEQ ID NO: 12977 - DNA, 21 bp, Homo sapiens
gaaccgagaamagaaacttgt

SEQ ID NO: 12978 - DNA, 21 bp, Homo sapiens
agcatcaactrgctctagtgg

SEQ ID NO: 12979 - DNA, 21 bp, Homo sapiens
tgtcctaattscccatctgtc

SEQ ID NO: 12980 - DNA, 21 bp, Homo sapiens
tggaaataccygacctcaatc

SEQ ID NO: 12981 - DNA, 21 bp, Homo sapiens
atacgtgtgaytaaaatagaa

SEQ ID NO: 12982 - DNA, 21 bp, Homo sapiens
agagcctacamggaacttctc

SEQ ID NO: 12983 - DNA, 21 bp, Homo sapiens
tcactgctctrcttaaagact

SEQ ID NO: 12984 - DNA, 21 bp, Homo sapiens
gggataattcygtctcctgtc

SEQ ID NO: 12985 - DNA, 21 bp, Homo sapiens
ataatttctgyggcaacacaa

SEQ ID NO: 12986 - DNA, 21 bp, Homo sapiens
agctctgataktatgaacaag

SEQ ID NO: 12987 - DNA, 21 bp, Homo sapiens
atgaggaaacratcagaacga

SEQ ID NO: 12988 - DNA, 21 bp, Homo sapiens
tatcaggttaygaagagaacc

SEQ ID NO: 12989 - DNA, 21 bp, Homo sapiens
gtctcagatcrtagacaccag

SEQ ID NO: 12990 - DNA, 21 bp, Homo sapiens
atcaagagccrctaaaggtac

SEQ ID NO: 12991 - DNA, 21 bp, Homo sapiens
tggctccaggkgctcaagtca

SEQ ID NO: 12992 - DNA, 21 bp, Homo sapiens
tgagaactggktgtctgcttg

SEQ ID NO: 12993 - DNA, 21 bp, Homo sapiens
cagtggctccrggtggactgc

SEQ ID NO: 12994 - DNA, 21 bp, Homo sapiens
tccataaatgrtcggttaaaa

SEQ ID NO: 12995 - DNA, 21 bp, Homo sapiens
gaaaatcgacwcttaagaaac

SEQ ID NO: 12996 - DNA, 21 bp, Homo sapiens
aaacaaaaaamtgttgctgat

SEQ ID NO: 12997 - DNA, 21 bp, Homo sapiens
taaggtcttcygcgtcattag

SEQ ID NO: 12998 - DNA, 21 bp, Homo sapiens
tggatgacacrgtaccctcag

SEQ ID NO: 12999 - DNA, 21 bp, Homo sapiens
atgcacaggargaggggaaga

SEQ ID NO: 13000 - DNA, 21 bp, Homo sapiens
tgatcacccarttagtcccac

SEQ ID NO: 13001 - DNA, 21 bp, Homo sapiens
ggcataaaatrttaccattgg

SEQ ID NO: 13002 - DNA, 21 bp, Homo sapiens
ttgaattcagygatacctttg

SEQ ID NO: 13003 - DNA, 21 bp, Homo sapiens
cctttcgatgytctctttctc

SEQ ID NO: 13004 - DNA, 21 bp, Homo sapiens
ggcctcaaagkgttttgcaat

SEQ ID NO: 13005 - DNA, 21 bp, Homo sapiens
ttacacaactyagctatgact

SEQ ID NO: 13006 - DNA, 21 bp, Homo sapiens
tgcatcatttytgttttctgt

SEQ ID NO: 13007 - DNA, 21 bp, Homo sapiens
ttgacagaggwcttggacagt

SEQ ID NO: 13008 - DNA, 21 bp, Homo sapiens
ctttaggtgawttatgttttg

SEQ ID NO: 13009 - DNA, 21 bp, Homo sapiens
ttgtaccctgmaaaacctgag

SEQ ID NO: 13010 - DNA, 21 bp, Homo sapiens
gtgagctaaaygtttccagag

SEQ ID NO: 13011 - DNA, 21 bp, Homo sapiens
gaagtgttacytgaactgaaa

SEQ ID NO: 13012 - DNA, 21 bp, Homo sapiens
acatagaagtyaataaatcct

SEQ ID NO: 13013 - DNA, 21 bp, Homo sapiens
accctgtttcyaggaggactt

SEQ ID NO: 13014 - DNA, 21 bp, Homo sapiens
tcacggtgacwggaactcggc

SEQ ID NO: 13015 - DNA, 21 bp, Homo sapiens
gcagctattcraacagtcagt

SEQ ID NO: 13016 - DNA, 21 bp, Homo sapiens
ccaacctctcyccatgttttt

SEQ ID NO: 13017 - DNA, 21 bp, Homo sapiens
gcaacagatamgtacaatcca

SEQ ID NO: 13018 - DNA, 21 bp, Homo sapiens
agagattgatyaacttgttta

SEQ ID NO: 13019 - DNA, 21 bp, Homo sapiens
ctcccattcgsttttctgcct

SEQ ID NO: 13020 - DNA, 21 bp, Homo sapiens
aaaactgtcaygcattatagc

SEQ ID NO: 13021 - DNA, 21 bp, Homo sapiens
tgtatttacartctcatgtca

SEQ ID NO: 13022 - DNA, 21 bp, Homo sapiens
aatagttactrcccatctttc

SEQ ID NO: 13023 - DNA, 21 bp, Homo sapiens
ttcaattcagkggctacgggc

SEQ ID NO: 13024 - DNA, 21 bp, Homo sapiens
ttctgcagccrcttccctttc

SEQ ID NO: 13025 - DNA, 21 bp, Homo sapiens
gggaaaaaaakttatagtgta

SEQ ID NO: 13026 - DNA, 21 bp, Homo sapiens
tttagggtgamtagatgtata

SEQ ID NO: 13027 - DNA, 21 bp, Homo sapiens
tttctcagatrtgtttgaggt

SEQ ID NO: 13028 - DNA, 21 bp, Homo sapiens
agaatttgaayggggatcatg

SEQ ID NO: 13029 - DNA, 21 bp, Homo sapiens
taccatctaawatttgtaatg

SEQ ID NO: 13030 - DNA, 21 bp, Homo sapiens
tgtataatctraatgaggaag

SEQ ID NO: 13031 - DNA, 21 bp, Homo sapiens
aaaacaatgtmctgataccct

SEQ ID NO: 13032 - DNA, 21 bp, Homo sapiens
agcatgtaaasgaaaaaaaca

SEQ ID NO: 13033 - DNA, 21 bp, Homo sapiens
tttaccttggktgcaataatt

SEQ ID NO: 13034 - DNA, 21 bp, Homo sapiens
gcattttcccyggaagatgtc

SEQ ID NO: 13035 - DNA, 21 bp, Homo sapiens
aatgcatactstattactctt

SEQ ID NO: 13036 - DNA, 21 bp, Homo sapiens
ttgattgtttwactaacattt

SEQ ID NO: 13037 - DNA, 21 bp, Homo sapiens
tttcccaagaktaaatatgat

SEQ ID NO: 13038 - DNA, 21 bp, Homo sapiens
cctggcaatgytgagcctgca

SEQ ID NO: 13039 - DNA, 21 bp, Homo sapiens
cagaagtcaakctgtgatcac

SEQ ID NO: 13040 - DNA, 21 bp, Homo sapiens
cctgtcttcaraaaaagcagc

SEQ ID NO: 13041 - DNA, 21 bp, Homo sapiens
cgggacccagkagctggtatt

SEQ ID NO: 13042 - DNA, 21 bp, Homo sapiens
taaaacctcamcttcaatggt

SEQ ID NO: 13043 - DNA, 21 bp, Homo sapiens
aaaccaggttwttcctattaa

SEQ ID NO: 13044 - DNA, 21 bp, Homo sapiens
ttcctggtctstcttcatcct

SEQ ID NO: 13045 - DNA, 21 bp, Homo sapiens
ttttgaatatstctcttggga

SEQ ID NO: 13046 - DNA, 21 bp, Homo sapiens
tatccttggtmcatcagaagt

SEQ ID NO: 13047 - DNA, 21 bp, Homo sapiens
aaattagtttscagtctttta

SEQ ID NO: 13048 - DNA, 21 bp, Homo sapiens
ctcaggccctycgagctttag

SEQ ID NO: 13049 - DNA, 21 bp, Homo sapiens
atataagagarctggaaatgc

SEQ ID NO: 13050 - DNA, 21 bp, Homo sapiens
tgaatttctartttttcacat

SEQ ID NO: 13051 - DNA, 21 bp, Homo sapiens
ctctgagaagsctttgaaaat

SEQ ID NO: 13052 - DNA, 21 bp, Homo sapiens
aaaattatatrtgaaggacct

SEQ ID NO: 13053 - DNA, 21 bp, Homo sapiens
gttgacctctmagcttttcta

SEQ ID NO: 13054 - DNA, 21 bp, Homo sapiens
gtaaaagtgawatgctaaact

SEQ ID NO: 13055 - DNA, 21 bp, Homo sapiens
ataaaattacrttctgcttaa

SEQ ID NO: 13056 - DNA, 21 bp, Homo sapiens
catctaagaaytgtaaatcag

SEQ ID NO: 13057 - DNA, 21 bp, Homo sapiens
ataggtctacwgaaaaaaaaa

SEQ ID NO: 13058 - DNA, 21 bp, Homo sapiens
agcttttcctwaatacactgt

SEQ ID NO: 13059 - DNA, 21 bp, Homo sapiens
aaaactgtgcratctattact

SEQ ID NO: 13060 - DNA, 21 bp, Homo sapiens
ttttccagaaygttgtcgtag

SEQ ID NO: 13061 - DNA, 21 bp, Homo sapiens
ggaatttgccwtgaatgcaat

SEQ ID NO: 13062 - DNA, 21 bp, Homo sapiens
ctgtttaaaaygattttataa

SEQ ID NO: 13063 - DNA, 21 bp, Homo sapiens
ttcaatttgtrttatggtaaa

SEQ ID NO: 13064 - DNA, 21 bp, Homo sapiens
tatagttcttyctttttcatt

SEQ ID NO: 13065 - DNA, 21 bp, Homo sapiens
aagccatggakgaatctaatt

SEQ ID NO: 13066 - DNA, 21 bp, Homo sapiens
taattcaaaamcctaaacctt

SEQ ID NO: 13067 - DNA, 21 bp, Homo sapiens
ccacactcaayggaaactgaa

SEQ ID NO: 13068 - DNA, 21 bp, Homo sapiens
cttcgtggaargaacagcacc

SEQ ID NO: 13069 - DNA, 21 bp, Homo sapiens
acataactacktccaattatg

SEQ ID NO: 13070 - DNA, 21 bp, Homo sapiens
gggaagtccaycttaggcaac

SEQ ID NO: 13071 - DNA, 21 bp, Homo sapiens
tgagattgagwgaatgaaatg

SEQ ID NO: 13072 - DNA, 21 bp, Homo sapiens
tgagaacaagwttaaagtata

SEQ ID NO: 13073 - DNA, 21 bp, Homo sapiens
cagtgcaacaytagtcataaa

SEQ ID NO: 13074 - DNA, 21 bp, Homo sapiens
taagcaacttkcatctttatg

SEQ ID NO: 13075 - DNA, 21 bp, Homo sapiens
taaagaaacakatattcattg

SEQ ID NO: 13076 - DNA, 21 bp, Homo sapiens
ttcattttttkttggattcat

SEQ ID NO: 13077 - DNA, 21 bp, Homo sapiens
atgtattttcwtcaaaaagtt

SEQ ID NO: 13078 - DNA, 21 bp, Homo sapiens
cctaatcattktctttcaagg

SEQ ID NO: 13079 - DNA, 21 bp, Homo sapiens
tttgagtcttrtgtttttcca

SEQ ID NO: 13080 - DNA, 21 bp, Homo sapiens
atcctccccayaggaaaccac

SEQ ID NO: 13081 - DNA, 21 bp, Homo sapiens
atatcactgcrtatgacaatg

SEQ ID NO: 13082 - DNA, 21 bp, Homo sapiens
gggagatgccrttatgtgttc

SEQ ID NO: 13083 - DNA, 21 bp, Homo sapiens
cattttcagarttaattgtgt

SEQ ID NO: 13084 - DNA, 21 bp, Homo sapiens
gatctttatgytcacctttac

SEQ ID NO: 13085 - DNA, 21 bp, Homo sapiens
atttggaaaarggtaaaatta

SEQ ID NO: 13086 - DNA, 21 bp, Homo sapiens
ccaagcttcayggggtagccg

SEQ ID NO: 13087 - DNA, 21 bp, Homo sapiens
ttggatcaaaycttttatagg

SEQ ID NO: 13088 - DNA, 21 bp, Homo sapiens
acatgacacarcttttttcca

SEQ ID NO: 13089 - DNA, 21 bp, Homo sapiens
ttttgctttgyggactaatct

SEQ ID NO: 13090 - DNA, 21 bp, Homo sapiens
ttgctcatctraattaatcct

SEQ ID NO: 13091 - DNA, 21 bp, Homo sapiens
tatccttaaargtaaagatga

SEQ ID NO: 13092 - DNA, 21 bp, Homo sapiens
tatctgagtcrtgcagcacct

SEQ ID NO: 13093 - DNA, 21 bp, Homo sapiens
ctctaaatggrtgacgaggtt

SEQ ID NO: 13094 - DNA, 21 bp, Homo sapiens
ttgaagtaaamttttgtattg

SEQ ID NO: 13095 - DNA, 21 bp, Homo sapiens
agtctggttcyggagttagca

SEQ ID NO: 13096 - DNA, 21 bp, Homo sapiens
aaatatgtacrtgcactcttt

SEQ ID NO: 13097 - DNA, 21 bp, Homo sapiens
caactcagatycaccattaat

SEQ ID NO: 13098 - DNA, 21 bp, Homo sapiens
acacaacttamtcaaattaat

SEQ ID NO: 13099 - DNA, 21 bp, Homo sapiens
tggtctggctyttttagaggt

SEQ ID NO: 13100 - DNA, 21 bp, Homo sapiens
ctcagtgcttygatataggag

SEQ ID NO: 13101 - DNA, 21 bp, Homo sapiens
ggtctttcaaytgaaactaga

SEQ ID NO: 13102 - DNA, 21 bp, Homo sapiens
cctatccccartttgatacta

SEQ ID NO: 13103 - DNA, 21 bp, Homo sapiens
cagcagtcagyattgaatggt

SEQ ID NO: 13104 - DNA, 21 bp, Homo sapiens
cactctgcatygtacagcata

SEQ ID NO: 13105 - DNA, 21 bp, Homo sapiens
gacgtgttgtyttagaattct

SEQ ID NO: 13106 - DNA, 21 bp, Homo sapiens
ttcaggtcagyatctaccatg

SEQ ID NO: 13107 - DNA, 21 bp, Homo sapiens
tccttctcttyaaatcttaca

SEQ ID NO: 13108 - DNA, 21 bp, Homo sapiens
gtcattatctstggtggaaaa

SEQ ID NO: 13109 - DNA, 21 bp, Homo sapiens
acccaagcgartatgttctgt

SEQ ID NO: 13110 - DNA, 21 bp, Homo sapiens
ggtgtttggtrtctatcccat

SEQ ID NO: 13111 - DNA, 21 bp, Homo sapiens
tgtccctgaamaaggcaaagc

SEQ ID NO: 13112 - DNA, 21 bp, Homo sapiens
cactctcaaarccaaagggga

SEQ ID NO: 13113 - DNA, 21 bp, Homo sapiens
tgcaagcccgyactccactag

SEQ ID NO: 13114 - DNA, 21 bp, Homo sapiens
gctgttaaaakctgactgggt

SEQ ID NO: 13115 - DNA, 21 bp, Homo sapiens
ttatcaacaayaaattttcat

SEQ ID NO: 13116 - DNA, 21 bp, Homo sapiens
tctaggtactkcaagattctt

SEQ ID NO: 13117 - DNA, 21 bp, Homo sapiens
attatcaaacrtagcactcct

SEQ ID NO: 13118 - DNA, 21 bp, Homo sapiens
acagctttatmgttaaaatgg

SEQ ID NO: 13119 - DNA, 21 bp, Homo sapiens
attcattcacraagttatcct

SEQ ID NO: 13120 - DNA, 21 bp, Homo sapiens
ctacacacttkaagaaaaaag

SEQ ID NO: 13121 - DNA, 21 bp, Homo sapiens
gagaggtggartgtgctatgg

SEQ ID NO: 13122 - DNA, 21 bp, Homo sapiens
gcatattctcrtaagtgataa

SEQ ID NO: 13123 - DNA, 21 bp, Homo sapiens
caatactcaaktcctgctgga

SEQ ID NO: 13124 - DNA, 21 bp, Homo sapiens
tcagaccccarttatgctatt

SEQ ID NO: 13125 - DNA, 21 bp, Homo sapiens
ctgtcaagcargaaggagctg

SEQ ID NO: 13126 - DNA, 21 bp, Homo sapiens
gtaagcagccrttagaaatga

SEQ ID NO: 13127 - DNA, 21 bp, Homo sapiens
tgttctgagasacactaatga

SEQ ID NO: 13128 - DNA, 21 bp, Homo sapiens
ttatcttaagsgctttctgtt

SEQ ID NO: 13129 - DNA, 21 bp, Homo sapiens
acacagaacasatcaatagtc

SEQ ID NO: 13130 - DNA, 21 bp, Homo sapiens
tagcaattaayataaagtgat

SEQ ID NO: 13131 - DNA, 21 bp, Homo sapiens
ccaatatgccygggagagctg

SEQ ID NO: 13132 - DNA, 21 bp, Homo sapiens
actgtatgtcwgggatgtgca

SEQ ID NO: 13133 - DNA, 21 bp, Homo sapiens
atgctgaaagrtgtaaattcc

SEQ ID NO: 13134 - DNA, 21 bp, Homo sapiens
tttgatgagayaacttcttga

SEQ ID NO: 13135 - DNA, 21 bp, Homo sapiens
cttgttatttyatgctgtcta

SEQ ID NO: 13136 - DNA, 21 bp, Homo sapiens
ctcaaccgacratattattaa

SEQ ID NO: 13137 - DNA, 21 bp, Homo sapiens
accttgacatmatgaaattct

SEQ ID NO: 13138 - DNA, 21 bp, Homo sapiens
acacagaatckgcaagggcat

SEQ ID NO: 13139 - DNA, 21 bp, Homo sapiens
ttttaaataakcagctttcta

SEQ ID NO: 13140 - DNA, 21 bp, Homo sapiens
aaagttttgcrtgaataaaat

SEQ ID NO: 13141 - DNA, 21 bp, Homo sapiens
gttataatacrctcctcaaaa

SEQ ID NO: 13142 - DNA, 21 bp, Homo sapiens
cagcagaggarcaaaatccct

SEQ ID NO: 13143 - DNA, 21 bp, Homo sapiens
aatactaatckttgctactgg

SEQ ID NO: 13144 - DNA, 21 bp, Homo sapiens
aatctttcagkcgtgagtttt

SEQ ID NO: 13145 - DNA, 21 bp, Homo sapiens
atgagtaactycagggtccag

SEQ ID NO: 13146 - DNA, 21 bp, Homo sapiens
acatcacttastgctattact

SEQ ID NO: 13147 - DNA, 21 bp, Homo sapiens
attctaaaagrttttaacaac

SEQ ID NO: 13148 - DNA, 21 bp, Homo sapiens
ctaagtttgcwgataaaggct

SEQ ID NO: 13149 - DNA, 21 bp, Homo sapiens
atgccagacawagagaagatt

SEQ ID NO: 13150 - DNA, 21 bp, Homo sapiens
ctcattatatyggtaacatcc

SEQ ID NO: 13151 - DNA, 21 bp, Homo sapiens
agaatctcagygatagcccat

SEQ ID NO: 13152 - DNA, 21 bp, Homo sapiens
cattgccagtstgccccaaat

SEQ ID NO: 13153 - DNA, 21 bp, Homo sapiens
gtactatcacycactgtcccc

SEQ ID NO: 13154 - DNA, 21 bp, Homo sapiens
tgaatcacacrcttttcggac

SEQ ID NO: 13155 - DNA, 21 bp, Homo sapiens
tggacccttawtaaaaatgaa

SEQ ID NO: 13156 - DNA, 21 bp, Homo sapiens
acaaaacagtyagccgagctc

SEQ ID NO: 13157 - DNA, 21 bp, Homo sapiens
gactcatactsatcaccttag

SEQ ID NO: 13158 - DNA, 21 bp, Homo sapiens
gctacctaacmgaagtaatca

SEQ ID NO: 13159 - DNA, 21 bp, Homo sapiens
actgatgttcwttatggctat

SEQ ID NO: 13160 - DNA, 21 bp, Homo sapiens
ttttttgtgcrttttcaaata

SEQ ID NO: 13161 - DNA, 21 bp, Homo sapiens
agcctacacarcatgaaacaa

SEQ ID NO: 13162 - DNA, 21 bp, Homo sapiens
tttgattctawaacaattctc

SEQ ID NO: 13163 - DNA, 21 bp, Homo sapiens
acattctttakaggcacacac

SEQ ID NO: 13164 - DNA, 21 bp, Homo sapiens
aggaaagaagyatgacatagc

SEQ ID NO: 13165 - DNA, 21 bp, Homo sapiens
gactttttcasgaaacaggca

SEQ ID NO: 13166 - DNA, 21 bp, Homo sapiens
gaaatttttcrtgttttcctt

SEQ ID NO: 13167 - DNA, 21 bp, Homo sapiens
ctcctgaagtycccaagatcc

SEQ ID NO: 13168 - DNA, 21 bp, Homo sapiens
gctggtgttartactgaaatt

SEQ ID NO: 13169 - DNA, 21 bp, Homo sapiens
cacaatagccrcgtaacattt

SEQ ID NO: 13170 - DNA, 21 bp, Homo sapiens
taggggaaaayagataccggt

SEQ ID NO: 13171 - DNA, 21 bp, Homo sapiens
gtgagatgtgkagaaaagagc

SEQ ID NO: 13172 - DNA, 21 bp, Homo sapiens
acctctgaaargaaaaactca

SEQ ID NO: 13173 - DNA, 21 bp, Homo sapiens
aagatttttcytgcactttca

SEQ ID NO: 13174 - DNA, 21 bp, Homo sapiens
ttgtaataatracaaaaaagt

SEQ ID NO: 13175 - DNA, 21 bp, Homo sapiens
agaagagcaamaaaattaaag

SEQ ID NO: 13176 - DNA, 21 bp, Homo sapiens
tacatcacacrattttctctt

SEQ ID NO: 13177 - DNA, 21 bp, Homo sapiens
ggggatataaytgtttttgta

SEQ ID NO: 13178 - DNA, 21 bp, Homo sapiens
gccataattcktttcccagta

SEQ ID NO: 13179 - DNA, 21 bp, Homo sapiens
ccagtaaacamtgttgcatga

SEQ ID NO: 13180 - DNA, 21 bp, Homo sapiens
ggacaggtacygaaaagaaaa

SEQ ID NO: 13181 - DNA, 21 bp, Homo sapiens
tgtagattacrttttgaagct

SEQ ID NO: 13182 - DNA, 21 bp, Homo sapiens
caaaggcatgsacagtgtgta

SEQ ID NO: 13183 - DNA, 21 bp, Homo sapiens
ctgaaaaggtyggtggagaat

SEQ ID NO: 13184 - DNA, 21 bp, Homo sapiens
gtattgatttyttattaacca

SEQ ID NO: 13185 - DNA, 21 bp, Homo sapiens
tcagattcctsatgcatagat

SEQ ID NO: 13186 - DNA, 21 bp, Homo sapiens
cgtgagaaatkgttagtccat

SEQ ID NO: 13187 - DNA, 21 bp, Homo sapiens
agctgtcacaytaccataacc

SEQ ID NO: 13188 - DNA, 21 bp, Homo sapiens
tcgcatgcccrggaggaaagc

SEQ ID NO: 13189 - DNA, 21 bp, Homo sapiens
tttccaacccmtggcaccagt

SEQ ID NO: 13190 - DNA, 21 bp, Homo sapiens
ataatatgcamatacaacatg

SEQ ID NO: 13191 - DNA, 21 bp, Homo sapiens
cacatatttgkatgcactgag

SEQ ID NO: 13192 - DNA, 21 bp, Homo sapiens
ctaggtaactraggtcatgtc

SEQ ID NO: 13193 - DNA, 21 bp, Homo sapiens
tcatgtctgargccacggcaa

SEQ ID NO: 13194 - DNA, 21 bp, Homo sapiens
aaaatgggacyagttaaacaa

SEQ ID NO: 13195 - DNA, 21 bp, Homo sapiens
taggagcaaascaatctgctt

SEQ ID NO: 13196 - DNA, 21 bp, Homo sapiens
cccaagcatgrcacctataga

SEQ ID NO: 13197 - DNA, 21 bp, Homo sapiens
agagaaatgayctaattgtag

SEQ ID NO: 13198 - DNA, 21 bp, Homo sapiens
tgtgttgtatrgttcttgtct

SEQ ID NO: 13199 - DNA, 21 bp, Homo sapiens
aaatgtggcaytggcttccta

SEQ ID NO: 13200 - DNA, 21 bp, Homo sapiens
aattgtagagrgctgggtgtg

SEQ ID NO: 13201 - DNA, 21 bp, Homo sapiens
cttcagcagcyagagttggcc

SEQ ID NO: 13202 - DNA, 21 bp, Homo sapiens
agctcacatgyatttgcattt

SEQ ID NO: 13203 - DNA, 21 bp, Homo sapiens
ggtctgagatrccaattatta

SEQ ID NO: 13204 - DNA, 21 bp, Homo sapiens
atttcacatcrttgcataaaa

SEQ ID NO: 13205 - DNA, 21 bp, Homo sapiens
gttgggaaagmaggatcagta

SEQ ID NO: 13206 - DNA, 21 bp, Homo sapiens
tccagcagaarttagaaaatg

SEQ ID NO: 13207 - DNA, 21 bp, Homo sapiens
tacaagtcttmcatattttct

SEQ ID NO: 13208 - DNA, 21 bp, Homo sapiens
atatatgcctraggtaatttt

SEQ ID NO: 13209 - DNA, 21 bp, Homo sapiens
tggcattgtamtaaaaattat

SEQ ID NO: 13210 - DNA, 21 bp, Homo sapiens
actgattgctscctgtgtcca

SEQ ID NO: 13211 - DNA, 21 bp, Homo sapiens
tacgggatcgyggtaatcaca

SEQ ID NO: 13212 - DNA, 21 bp, Homo sapiens
catcgcaagcygttttaaatc

SEQ ID NO: 13213 - DNA, 21 bp, Homo sapiens
aatctgcttgyatgtgtcctt

SEQ ID NO: 13214 - DNA, 21 bp, Homo sapiens
gattttcatcrtgttactgga

SEQ ID NO: 13215 - DNA, 21 bp, Homo sapiens
ttaacaagttwgggttgactc

SEQ ID NO: 13216 - DNA, 21 bp, Homo sapiens
cttcccttatrgattatggaa

SEQ ID NO: 13217 - DNA, 21 bp, Homo sapiens
ccagttcaccrtgtctcatcc

SEQ ID NO: 13218 - DNA, 21 bp, Homo sapiens
attctcacccyggtgggttgt

SEQ ID NO: 13219 - DNA, 21 bp, Homo sapiens
gtgcagtggaraagcttaccc

SEQ ID NO: 13220 - DNA, 21 bp, Homo sapiens
tgaattctaasaacaaatcct

SEQ ID NO: 13221 - DNA, 21 bp, Homo sapiens
tgctgtgttayagtgtaattt

SEQ ID NO: 13222 - DNA, 21 bp, Homo sapiens
aataagagccraagtggatgt

SEQ ID NO: 13223 - DNA, 21 bp, Homo sapiens
ctgcatatggyggaagggcag

SEQ ID NO: 13224 - DNA, 21 bp, Homo sapiens
gttcctgtatyagtgaggagg

SEQ ID NO: 13225 - DNA, 21 bp, Homo sapiens
catcttccaarccaaggatgt

SEQ ID NO: 13226 - DNA, 21 bp, Homo sapiens
tttacaatcarcaaaatggag

SEQ ID NO: 13227 - DNA, 21 bp, Homo sapiens
gttgctctctrcagcccacct

SEQ ID NO: 13228 - DNA, 21 bp, Homo sapiens
ttgtttatgakagtttaaata

SEQ ID NO: 13229 - DNA, 21 bp, Homo sapiens
aaagaattcayatcgaggaaa

SEQ ID NO: 13230 - DNA, 21 bp, Homo sapiens
aatggttccaygagatgtcca

SEQ ID NO: 13231 - DNA, 21 bp, Homo sapiens
atgcacaaaamcatatatgat

SEQ ID NO: 13232 - DNA, 21 bp, Homo sapiens
ttaggaaacayagatgtgcaa

SEQ ID NO: 13233 - DNA, 21 bp, Homo sapiens
aagggataaartcaatgatca

SEQ ID NO: 13234 - DNA, 21 bp, Homo sapiens
ctatctagctrcctagttgct

SEQ ID NO: 13235 - DNA, 21 bp, Homo sapiens
tctgatttcaytgactagatc

SEQ ID NO: 13236 - DNA, 21 bp, Homo sapiens
ttatttcatgktatactggaa

SEQ ID NO: 13237 - DNA, 21 bp, Homo sapiens
ttataggtgtrcgtattgata

SEQ ID NO: 13238 - DNA, 21 bp, Homo sapiens
cattttattgytccatcagag

SEQ ID NO: 13239 - DNA, 21 bp, Homo sapiens
ttgtagtgaargaggtatctt

SEQ ID NO: 13240 - DNA, 21 bp, Homo sapiens
tagttcctttwtttttcctgc

SEQ ID NO: 13241 - DNA, 21 bp, Homo sapiens
tatttactaayttatgacttt

SEQ ID NO: 13242 - DNA, 21 bp, Homo sapiens
tgattacaacwcattcttcaa

SEQ ID NO: 13243 - DNA, 21 bp, Homo sapiens
aagatcaatasggagattaag

SEQ ID NO: 13244 - DNA, 21 bp, Homo sapiens
gcccagagtgmcttaataaaa

SEQ ID NO: 13245 - DNA, 21 bp, Homo sapiens
tgtaaatcatrgctgacatat

SEQ ID NO: 13246 - DNA, 21 bp, Homo sapiens
cctgtcgctgmatagttcctg

SEQ ID NO: 13247 - DNA, 21 bp, Homo sapiens
acttgcacaaytttattttta

SEQ ID NO: 13248 - DNA, 21 bp, Homo sapiens
agaaaatgtayattcatccag

SEQ ID NO: 13249 - DNA, 21 bp, Homo sapiens
ataacatgcaraagtataagt

SEQ ID NO: 13250 - DNA, 21 bp, Homo sapiens
gacagggttaytaagcaaatt

SEQ ID NO: 13251 - DNA, 21 bp, Homo sapiens
tgaatagactrcttttgcata

SEQ ID NO: 13252 - DNA, 21 bp, Homo sapiens
ttgtcaagatrtggagcaaat

SEQ ID NO: 13253 - DNA, 21 bp, Homo sapiens
ccactctcttwcttgtttcct

SEQ ID NO: 13254 - DNA, 21 bp, Homo sapiens
aataactactrtctagaaaaa

SEQ ID NO: 13255 - DNA, 21 bp, Homo sapiens
tgatagtagtwtttttagtgg

SEQ ID NO: 13256 - DNA, 21 bp, Homo sapiens
tacctattttmgtttatgcca

SEQ ID NO: 13257 - DNA, 21 bp, Homo sapiens
cttgcttctgmtatccaagct

SEQ ID NO: 13258 - DNA, 21 bp, Homo sapiens
agggttgagtyaggcttactt

SEQ ID NO: 13259 - DNA, 21 bp, Homo sapiens
aactggcatgygttcacaaat

SEQ ID NO: 13260 - DNA, 21 bp, Homo sapiens
acttccagggygtgatgaatc

SEQ ID NO: 13261 - DNA, 21 bp, Homo sapiens
ctgtgtaactytgggacactc

SEQ ID NO: 13262 - DNA, 21 bp, Homo sapiens
ctcctaaactrgaatggaata

SEQ ID NO: 13263 - DNA, 21 bp, Homo sapiens
aagcagcaaargcttcctcag

SEQ ID NO: 13264 - DNA, 21 bp, Homo sapiens
atgtacctgcwcctatacagc

SEQ ID NO: 13265 - DNA, 21 bp, Homo sapiens
aatggctcttycagcccaagg

SEQ ID NO: 13266 - DNA, 21 bp, Homo sapiens
actgaaatagrgaagacactc

SEQ ID NO: 13267 - DNA, 21 bp, Homo sapiens
tctctgaaacsttgataagga

SEQ ID NO: 13268 - DNA, 21 bp, Homo sapiens
tgaaacacccygtcaagctcc

SEQ ID NO: 13269 - DNA, 21 bp, Homo sapiens
agttgcattarcacttaaata

SEQ ID NO: 13270 - DNA, 21 bp, Homo sapiens
tccagaatgcrgattgaataa

SEQ ID NO: 13271 - DNA, 21 bp, Homo sapiens
gcaaattagcmattggaaagt

SEQ ID NO: 13272 - DNA, 21 bp, Homo sapiens
gccatccagtkgttttcttta

SEQ ID NO: 13273 - DNA, 21 bp, Homo sapiens
tttcacctcaytgctggcact

SEQ ID NO: 13274 - DNA, 21 bp, Homo sapiens
ttatacagctrcctttgtcag

SEQ ID NO: 13275 - DNA, 21 bp, Homo sapiens
tcaggctgttkattcacagta

SEQ ID NO: 13276 - DNA, 21 bp, Homo sapiens
caggccttttytgcataccac

SEQ ID NO: 13277 - DNA, 21 bp, Homo sapiens
aaaacatgcasacaaacaaca

SEQ ID NO: 13278 - DNA, 21 bp, Homo sapiens
ccagtgatcayactatttcac

SEQ ID NO: 13279 - DNA, 21 bp, Homo sapiens
ggacttggaaygagtggggag

SEQ ID NO: 13280 - DNA, 21 bp, Homo sapiens
ggattatattkatggtcaaag

SEQ ID NO: 13281 - DNA, 21 bp, Homo sapiens
aagccagagasaaacgaggta

SEQ ID NO: 13282 - DNA, 21 bp, Homo sapiens
aagaggaagaycaaatttacg

SEQ ID NO: 13283 - DNA, 21 bp, Homo sapiens
tgctatatggraattgtagag

SEQ ID NO: 13284 - DNA, 21 bp, Homo sapiens
ttgaagagggsagatttcaaa

SEQ ID NO: 13285 - DNA, 21 bp, Homo sapiens
aaaacagcctkgtgtagacag

SEQ ID NO: 13286 - DNA, 21 bp, Homo sapiens
actactcccargcaaagaagg

SEQ ID NO: 13287 - DNA, 21 bp, Homo sapiens
tacttggaaamcattgagaag

SEQ ID NO: 13288 - DNA, 21 bp, Homo sapiens
ctggatgtgawcaaaatgagg

SEQ ID NO: 13289 - DNA, 21 bp, Homo sapiens
tctctgcatgygtactagatt

SEQ ID NO: 13290 - DNA, 21 bp, Homo sapiens
gctataggaayaaacagctat

SEQ ID NO: 13291 - DNA, 21 bp, Homo sapiens
gtttcagaggkgataccagaa

SEQ ID NO: 13292 - DNA, 21 bp, Homo sapiens
agctctttgayctatttacat

SEQ ID NO: 13293 - DNA, 21 bp, Homo sapiens
tcacagtctcwttccctgaat

SEQ ID NO: 13294 - DNA, 21 bp, Homo sapiens
ctgttgcttcracaaatcttt

SEQ ID NO: 13295 - DNA, 21 bp, Homo sapiens
tgatcaaaagsacctgacaac

SEQ ID NO: 13296 - DNA, 21 bp, Homo sapiens
aggatcagaayagtttcagtc

SEQ ID NO: 13297 - DNA, 21 bp, Homo sapiens
tcttcttaaartcagtgcctc

SEQ ID NO: 13298 - DNA, 21 bp, Homo sapiens
ctctgctctgrgaatctgctc

SEQ ID NO: 13299 - DNA, 21 bp, Homo sapiens
aaccaggctgyggagtttgga

SEQ ID NO: 13300 - DNA, 21 bp, Homo sapiens
gggtttactgsaagcaaatga

SEQ ID NO: 13301 - DNA, 21 bp, Homo sapiens
gagcctctcasagtccatcag

SEQ ID NO: 13302 - DNA, 21 bp, Homo sapiens
ggtttgcaaawgatccaggct

SEQ ID NO: 13303 - DNA, 21 bp, Homo sapiens
ccaaacaagtmttaactattg

SEQ ID NO: 13304 - DNA, 21 bp, Homo sapiens
gacatctgacrctgttatcga

SEQ ID NO: 13305 - DNA, 21 bp, Homo sapiens
tcacccagtcrgttcacagag

SEQ ID NO: 13306 - DNA, 21 bp, Homo sapiens
tcattttctgytcacccttta

SEQ ID NO: 13307 - DNA, 21 bp, Homo sapiens
aattctatggwaaaaaaagtt

SEQ ID NO: 13308 - DNA, 21 bp, Homo sapiens
cggtataaacrtaagacagaa

SEQ ID NO: 13309 - DNA, 21 bp, Homo sapiens
gtcattgaagrtattgagatt

SEQ ID NO: 13310 - DNA, 21 bp, Homo sapiens
caaaggctggyttctggcaca

SEQ ID NO: 13311 - DNA, 21 bp, Homo sapiens
aaaaagctaastttgtatttt

SEQ ID NO: 13312 - DNA, 21 bp, Homo sapiens
atctggagacytacagtaaaa

SEQ ID NO: 13313 - DNA, 21 bp, Homo sapiens
tgagactataygcaagattaa

SEQ ID NO: 13314 - DNA, 21 bp, Homo sapiens
gaattggcacwcccaagaata

SEQ ID NO: 13315 - DNA, 21 bp, Homo sapiens
cagtatcaccyggttagatgt

SEQ ID NO: 13316 - DNA, 21 bp, Homo sapiens
agtaaatatgmatcactgact

SEQ ID NO: 13317 - DNA, 21 bp, Homo sapiens
atgagctgggraaataaaggt

SEQ ID NO: 13318 - DNA, 21 bp, Homo sapiens
tatggcaatayaatgttgttc

SEQ ID NO: 13319 - DNA, 21 bp, Homo sapiens
ttgttacttasagcacaactt

SEQ ID NO: 13320 - DNA, 21 bp, Homo sapiens
gtatgtttttkgctcatagga

SEQ ID NO: 13321 - DNA, 21 bp, Homo sapiens
ttcatgtgtgkttaagattgt

SEQ ID NO: 13322 - DNA, 21 bp, Homo sapiens
cagcataggaractaaattgg

SEQ ID NO: 13323 - DNA, 21 bp, Homo sapiens
taatatttagmtgtttttaga

SEQ ID NO: 13324 - DNA, 21 bp, Homo sapiens
agttaaaagcwgagtgacaat

SEQ ID NO: 13325 - DNA, 21 bp, Homo sapiens
ttcttgtaaayatcaagtttt

SEQ ID NO: 13326 - DNA, 21 bp, Homo sapiens
tctccattgcrgcattaatat

SEQ ID NO: 13327 - DNA, 21 bp, Homo sapiens
actttgtacayttcttagcag

SEQ ID NO: 13328 - DNA, 21 bp, Homo sapiens
atctacttaargcaccttcaa

SEQ ID NO: 13329 - DNA, 21 bp, Homo sapiens
gtaactgaggwcagtgattcc

SEQ ID NO: 13330 - DNA, 21 bp, Homo sapiens
catcctgcttmactcctctga

SEQ ID NO: 13331 - DNA, 21 bp, Homo sapiens
tgccgtgtggytacattctgg

SEQ ID NO: 13332 - DNA, 21 bp, Homo sapiens
atttagcatcrtggttgggcc

SEQ ID NO: 13333 - DNA, 21 bp, Homo sapiens
aatttttgcawttttcctgcc

SEQ ID NO: 13334 - DNA, 21 bp, Homo sapiens
ttccttggaaraaccactttt

SEQ ID NO: 13335 - DNA, 21 bp, Homo sapiens
ttgactcaagwgacttatttt

SEQ ID NO: 13336 - DNA, 21 bp, Homo sapiens
ttaacctcccrtcatcactta

SEQ ID NO: 13337 - DNA, 21 bp, Homo sapiens
cacttaaattkcgggaaatga

SEQ ID NO: 13338 - DNA, 21 bp, Homo sapiens
taacaaggatyacccaaatac

SEQ ID NO: 13339 - DNA, 21 bp, Homo sapiens
gacattatttktatagcctga

SEQ ID NO: 13340 - DNA, 21 bp, Homo sapiens
tgagttagttsctacagccca

SEQ ID NO: 13341 - DNA, 21 bp, Homo sapiens
gaaaaaaaagrttaatccctg

SEQ ID NO: 13342 - DNA, 21 bp, Homo sapiens
agaatattttrtaacagagtt

SEQ ID NO: 13343 - DNA, 21 bp, Homo sapiens
tctataaaaawgaattatctc

SEQ ID NO: 13344 - DNA, 21 bp, Homo sapiens
aagatatcaarcataccagta

SEQ ID NO: 13345 - DNA, 21 bp, Homo sapiens
accattgctcyctgctagact

SEQ ID NO: 13346 - DNA, 21 bp, Homo sapiens
tttgtagacaytaactcagag

SEQ ID NO: 13347 - DNA, 21 bp, Homo sapiens
agtctgatatraagttgtcat

SEQ ID NO: 13348 - DNA, 21 bp, Homo sapiens
tggggtacctwatgcaaatat

SEQ ID NO: 13349 - DNA, 21 bp, Homo sapiens
catgggaactsccttcatgtg

SEQ ID NO: 13350 - DNA, 21 bp, Homo sapiens
cctcagaaacygtgtgccatc

SEQ ID NO: 13351 - DNA, 21 bp, Homo sapiens
agatcattccrcaagttggaa

SEQ ID NO: 13352 - DNA, 21 bp, Homo sapiens
cagctgagttmtaaatgcaac

SEQ ID NO: 13353 - DNA, 21 bp, Homo sapiens
taaatgttttstgcaaactgt

SEQ ID NO: 13354 - DNA, 21 bp, Homo sapiens
ttcgttttttwtactttgtgt

SEQ ID NO: 13355 - DNA, 21 bp, Homo sapiens
cgtgtgatgayagaagttaga

SEQ ID NO: 13356 - DNA, 21 bp, Homo sapiens
aagcggcctcyattatagaaa

SEQ ID NO: 13357 - DNA, 21 bp, Homo sapiens
ggaacttgttygttctttccc

SEQ ID NO: 13358 - DNA, 21 bp, Homo sapiens
tatggaattaygggcagggat

SEQ ID NO: 13359 - DNA, 21 bp, Homo sapiens
atggaattgastaaggtgaca

SEQ ID NO: 13360 - DNA, 21 bp, Homo sapiens
caaaacagcamgaacggtatt

SEQ ID NO: 13361 - DNA, 21 bp, Homo sapiens
tggactaaaargagcttataa

SEQ ID NO: 13362 - DNA, 21 bp, Homo sapiens
ggtatgaatcmttaaatacta

SEQ ID NO: 13363 - DNA, 21 bp, Homo sapiens
gtcctatgttyaaatactgca

SEQ ID NO: 13364 - DNA, 21 bp, Homo sapiens
tgttatgtagygagaactctc

SEQ ID NO: 13365 - DNA, 21 bp, Homo sapiens
tgccttatatrttgtaattca

SEQ ID NO: 13366 - DNA, 21 bp, Homo sapiens
atatctatcarttcattgcta

SEQ ID NO: 13367 - DNA, 21 bp, Homo sapiens
tgatagggagrtgaaagacag

SEQ ID NO: 13368 - DNA, 21 bp, Homo sapiens
taattgtaccrtataagtgga

SEQ ID NO: 13369 - DNA, 21 bp, Homo sapiens
catattatttytagaacagtg

SEQ ID NO: 13370 - DNA, 21 bp, Homo sapiens
tcgatgccagwatatgtaaaa

SEQ ID NO: 13371 - DNA, 21 bp, Homo sapiens
gcatcaaaagytctgttttcc

SEQ ID NO: 13372 - DNA, 21 bp, Homo sapiens
ggaaacatgasatagctcagg

SEQ ID NO: 13373 - DNA, 21 bp, Homo sapiens
gatcatttctygctacctgac

SEQ ID NO: 13374 - DNA, 21 bp, Homo sapiens
gctatatgtcygatcatctac

SEQ ID NO: 13375 - DNA, 21 bp, Homo sapiens
ggttcttgaaygaaatccagc

SEQ ID NO: 13376 - DNA, 21 bp, Homo sapiens
ctaaaactacrtattgactac

SEQ ID NO: 13377 - DNA, 21 bp, Homo sapiens
actcctactcytaatgcctgc

SEQ ID NO: 13378 - DNA, 21 bp, Homo sapiens
gaatactgcaycaagttaaat

SEQ ID NO: 13379 - DNA, 21 bp, Homo sapiens
agatcccttgraactgccttc

SEQ ID NO: 13380 - DNA, 21 bp, Homo sapiens
atgtctactcyggcattcagt

SEQ ID NO: 13381 - DNA, 21 bp, Homo sapiens
gtcagaccttrggaatccttt

SEQ ID NO: 13382 - DNA, 21 bp, Homo sapiens
ggcagaatgtrtgaaatgcaa

SEQ ID NO: 13383 - DNA, 21 bp, Homo sapiens
tcttttagagrtaataggtct

SEQ ID NO: 13384 - DNA, 21 bp, Homo sapiens
tactagagacyttccttctct

SEQ ID NO: 13385 - DNA, 21 bp, Homo sapiens
ctctgatgatwgtttgtttgt

SEQ ID NO: 13386 - DNA, 21 bp, Homo sapiens
acaatagtcartttcagatgc

SEQ ID NO: 13387 - DNA, 21 bp, Homo sapiens
ggaagtaatcrgggcagtgca

SEQ ID NO: 13388 - DNA, 21 bp, Homo sapiens
tatctttaaawtacagcgcaa

SEQ ID NO: 13389 - DNA, 21 bp, Homo sapiens
aatactatcaytgtttttttt

SEQ ID NO: 13390 - DNA, 21 bp, Homo sapiens
ctgttgactayacaaaatttg

SEQ ID NO: 13391 - DNA, 21 bp, Homo sapiens
cttatgatttwgatcatttct

SEQ ID NO: 13392 - DNA, 21 bp, Homo sapiens
actggattatyatgatggtaa

SEQ ID NO: 13393 - DNA, 21 bp, Homo sapiens
actcatcatgwtcatttcagt

SEQ ID NO: 13394 - DNA, 21 bp, Homo sapiens
tgattccgacytggcagacgc

SEQ ID NO: 13395 - DNA, 21 bp, Homo sapiens
agcatatctayctaggtttac

SEQ ID NO: 13396 - DNA, 21 bp, Homo sapiens
acaatattttrtattataatt

SEQ ID NO: 13397 - DNA, 21 bp, Homo sapiens
gttgtctcctsggagtttaaa

SEQ ID NO: 13398 - DNA, 21 bp, Homo sapiens
atacttttttwaaaaaaagga

SEQ ID NO: 13399 - DNA, 21 bp, Homo sapiens
aaaataggctyaagatttggt

SEQ ID NO: 13400 - DNA, 21 bp, Homo sapiens
cttagggcacrctgagagaag

SEQ ID NO: 13401 - DNA, 21 bp, Homo sapiens
tgagctactgytcttaaggaa

SEQ ID NO: 13402 - DNA, 21 bp, Homo sapiens
atatttaagayattgttctat

SEQ ID NO: 13403 - DNA, 21 bp, Homo sapiens
atcaatttacrtaaaagagaa

SEQ ID NO: 13404 - DNA, 21 bp, Homo sapiens
gtgagagttgytcttggttgg

SEQ ID NO: 13405 - DNA, 21 bp, Homo sapiens
aaagcaaagtmcaaaattata

SEQ ID NO: 13406 - DNA, 21 bp, Homo sapiens
ctatccatgawaatatccagc

SEQ ID NO: 13407 - DNA, 21 bp, Homo sapiens
acaatatcccrttgcatagac

SEQ ID NO: 13408 - DNA, 21 bp, Homo sapiens
cagcttttaawatatttcttt

SEQ ID NO: 13409 - DNA, 21 bp, Homo sapiens
tgctggatgaygaggattgta

SEQ ID NO: 13410 - DNA, 21 bp, Homo sapiens
cttttcttccrtttagctgag

SEQ ID NO: 13411 - DNA, 21 bp, Homo sapiens
gacaacaacartatcagctat

SEQ ID NO: 13412 - DNA, 21 bp, Homo sapiens
taatcaagagytgagttttgc

SEQ ID NO: 13413 - DNA, 21 bp, Homo sapiens
ctcaaccctaycaatgtttaa

SEQ ID NO: 13414 - DNA, 21 bp, Homo sapiens
caagtctttaycagcaatagc

SEQ ID NO: 13415 - DNA, 21 bp, Homo sapiens
ggaattacagktcacttattg

SEQ ID NO: 13416 - DNA, 21 bp, Homo sapiens
gtcttaatatwagcaagaatt

SEQ ID NO: 13417 - DNA, 21 bp, Homo sapiens
acagtacattkcttgaaaagt

SEQ ID NO: 13418 - DNA, 21 bp, Homo sapiens
gagagagaaaycatggagtct

SEQ ID NO: 13419 - DNA, 21 bp, Homo sapiens
agtgattaggyggttaggtga

SEQ ID NO: 13420 - DNA, 21 bp, Homo sapiens
ctgttgctctrctaataaatg

SEQ ID NO: 13421 - DNA, 21 bp, Homo sapiens
acttctttaayctatcatctg

SEQ ID NO: 13422 - DNA, 21 bp, Homo sapiens
tgagaaaggamagcagtcagt

SEQ ID NO: 13423 - DNA, 21 bp, Homo sapiens
aacactaacarctcatatttt

SEQ ID NO: 13424 - DNA, 21 bp, Homo sapiens
gcatttatctytttatttatg

SEQ ID NO: 13425 - DNA, 21 bp, Homo sapiens
atgcatgcatytctgtaaaat

SEQ ID NO: 13426 - DNA, 21 bp, Homo sapiens
tttttattgcwatattcagta

SEQ ID NO: 13427 - DNA, 21 bp, Homo sapiens
gttcttgacayttaaatactt

SEQ ID NO: 13428 - DNA, 21 bp, Homo sapiens
ctcctataatrcaagccccct

SEQ ID NO: 13429 - DNA, 21 bp, Homo sapiens
aagaactcaartttgctcagc

SEQ ID NO: 13430 - DNA, 21 bp, Homo sapiens
aaaaatgccaygaaaacaaaa

SEQ ID NO: 13431 - DNA, 21 bp, Homo sapiens
atttatatgayctggtactag

SEQ ID NO: 13432 - DNA, 21 bp, Homo sapiens
cttcagatgcytcctatgcaa

SEQ ID NO: 13433 - DNA, 21 bp, Homo sapiens
aatggcgtcayacaaaaaaga

SEQ ID NO: 13434 - DNA, 21 bp, Homo sapiens
ctctcagcacrcactcagatc

SEQ ID NO: 13435 - DNA, 21 bp, Homo sapiens
tagtcttggcsttgtgaactc

SEQ ID NO: 13436 - DNA, 21 bp, Homo sapiens
atatattcagyggaatctctt

SEQ ID NO: 13437 - DNA, 21 bp, Homo sapiens
tcttgatgctyatcttagtat

SEQ ID NO: 13438 - DNA, 21 bp, Homo sapiens
caaatgtcccrgttgtggtga

SEQ ID NO: 13439 - DNA, 21 bp, Homo sapiens
atctgatgatrtgaacaaaat

SEQ ID NO: 13440 - DNA, 21 bp, Homo sapiens
agcagggactrtgatttttct

SEQ ID NO: 13441 - DNA, 21 bp, Homo sapiens
aatcccttgtrtattcccagg

SEQ ID NO: 13442 - DNA, 21 bp, Homo sapiens
agtagctttaytgattggaac

SEQ ID NO: 13443 - DNA, 21 bp, Homo sapiens
ggtgcgccacmagcattgagg

SEQ ID NO: 13444 - DNA, 21 bp, Homo sapiens
tgtcccagtgrcctcatggct

SEQ ID NO: 13445 - DNA, 21 bp, Homo sapiens
caataagcctyacccaggagt

SEQ ID NO: 13446 - DNA, 21 bp, Homo sapiens
tcaggaataamtgaaaataag

SEQ ID NO: 13447 - DNA, 21 bp, Homo sapiens
ttcaacttggsaaatgtttga

SEQ ID NO: 13448 - DNA, 21 bp, Homo sapiens
catgcctcctstggatttacc

SEQ ID NO: 13449 - DNA, 21 bp, Homo sapiens
attgcagatartagacagctc

SEQ ID NO: 13450 - DNA, 21 bp, Homo sapiens
ggggcagccartgggacttct

SEQ ID NO: 13451 - DNA, 21 bp, Homo sapiens
ttcactcatayacctcacatt

SEQ ID NO: 13452 - DNA, 21 bp, Homo sapiens
ttcgacccttwaatctgttat

SEQ ID NO: 13453 - DNA, 21 bp, Homo sapiens
agagacttccrttatcactgc

SEQ ID NO: 13454 - DNA, 21 bp, Homo sapiens
atcaggtgcaracagaaattt

SEQ ID NO: 13455 - DNA, 21 bp, Homo sapiens
agcctacttaracagttcctt

SEQ ID NO: 13456 - DNA, 21 bp, Homo sapiens
tgaaattttaytagcttgaac

SEQ ID NO: 13457 - DNA, 21 bp, Homo sapiens
agtttagattrttagagaact

SEQ ID NO: 13458 - DNA, 21 bp, Homo sapiens
gtagtccagcrgagagtgata

SEQ ID NO: 13459 - DNA, 21 bp, Homo sapiens
ttgtcaatctmaggtaattgt

SEQ ID NO: 13460 - DNA, 21 bp, Homo sapiens
cctgaagagartataaaggtg

SEQ ID NO: 13461 - DNA, 21 bp, Homo sapiens
caagactcgarcgtaacactg

SEQ ID NO: 13462 - DNA, 21 bp, Homo sapiens
gttctaccccraaggatgtga

SEQ ID NO: 13463 - DNA, 21 bp, Homo sapiens
aatgtttttamttttgaaatg

SEQ ID NO: 13464 - DNA, 21 bp, Homo sapiens
ctttctaaagytttaaataca

SEQ ID NO: 13465 - DNA, 21 bp, Homo sapiens
cctcatatgtrtgcagattgt

SEQ ID NO: 13466 - DNA, 21 bp, Homo sapiens
atgatcacctygtcctttcct

SEQ ID NO: 13467 - DNA, 21 bp, Homo sapiens
ttcggggaatyccctttgctg

SEQ ID NO: 13468 - DNA, 21 bp, Homo sapiens
ttaaaaacttrtagaacataa

SEQ ID NO: 13469 - DNA, 21 bp, Homo sapiens
ctaaggctccrccccaaggcc

SEQ ID NO: 13470 - DNA, 21 bp, Homo sapiens
cgaatgctcckgcacatttgg

SEQ ID NO: 13471 - DNA, 21 bp, Homo sapiens
gaaagatttaygtcagaatgt

SEQ ID NO: 13472 - DNA, 21 bp, Homo sapiens
atggactgcaktgtgagtgag

SEQ ID NO: 13473 - DNA, 21 bp, Homo sapiens
ggatcaagaakcacggatgag

SEQ ID NO: 13474 - DNA, 21 bp, Homo sapiens
tcactaacccwtctgcttcct

SEQ ID NO: 13475 - DNA, 21 bp, Homo sapiens
agtggaatagyaattgtttct

SEQ ID NO: 13476 - DNA, 21 bp, Homo sapiens
gatggtaggarttagtgcaag

SEQ ID NO: 13477 - DNA, 21 bp, Homo sapiens
tgactgaaacmtggagaatta

SEQ ID NO: 13478 - DNA, 21 bp, Homo sapiens
tgatagcatgmtgttttatta

SEQ ID NO: 13479 - DNA, 21 bp, Homo sapiens
ccattcctcamgaaaatgaac

SEQ ID NO: 13480 - DNA, 21 bp, Homo sapiens
tgtgctatagsatgggagaaa

SEQ ID NO: 13481 - DNA, 21 bp, Homo sapiens
ttttaggcgtrtgtgtgggag

SEQ ID NO: 13482 - DNA, 21 bp, Homo sapiens
caggcactggmttgacttttg

SEQ ID NO: 13483 - DNA, 21 bp, Homo sapiens
tctagtgtttyctaacatgat

SEQ ID NO: 13484 - DNA, 21 bp, Homo sapiens
agtttggaaaygtacctagcc

SEQ ID NO: 13485 - DNA, 21 bp, Homo sapiens
attcacatcasgcccagcctt

SEQ ID NO: 13486 - DNA, 21 bp, Homo sapiens
ggcctgccgcrgtgaaaacat

SEQ ID NO: 13487 - DNA, 21 bp, Homo sapiens
tgatgagcacrttactgtcga

SEQ ID NO: 13488 - DNA, 21 bp, Homo sapiens
gcttcctgagrgtaggttgaa

SEQ ID NO: 13489 - DNA, 21 bp, Homo sapiens
aactgtgcggratcagtgttc

SEQ ID NO: 13490 - DNA, 21 bp, Homo sapiens
ttccacttgaygtgagcctct

SEQ ID NO: 13491 - DNA, 21 bp, Homo sapiens
gtcaatattgytctggaaaac

SEQ ID NO: 13492 - DNA, 21 bp, Homo sapiens
tctgccggacrgggccataca

SEQ ID NO: 13493 - DNA, 21 bp, Homo sapiens
aaccacaagarggtccctgtt

SEQ ID NO: 13494 - DNA, 21 bp, Homo sapiens
acatttcagaycctggagcag

SEQ ID NO: 13495 - DNA, 21 bp, Homo sapiens
aggttatagcygtgtcttggg

SEQ ID NO: 13496 - DNA, 21 bp, Homo sapiens
acttggggtcrcatcatagcc

SEQ ID NO: 13497 - DNA, 21 bp, Homo sapiens
tttcccagctyttggtgtttg

SEQ ID NO: 13498 - DNA, 21 bp, Homo sapiens
tgtcatgggtrataagaataa

SEQ ID NO: 13499 - DNA, 21 bp, Homo sapiens
aaaaatgcacrtatgtttata

SEQ ID NO: 13500 - DNA, 21 bp, Homo sapiens
tcccttggccrgtgcccagtg

SEQ ID NO: 13501 - DNA, 21 bp, Homo sapiens
tcttgcgtgcrtgttggcttg

SEQ ID NO: 13502 - DNA, 21 bp, Homo sapiens
ccctaatggarttctctgtgt

SEQ ID NO: 13503 - DNA, 21 bp, Homo sapiens
ctcagagattyggcttagtat

SEQ ID NO: 13504 - DNA, 21 bp, Homo sapiens
tcagaaatgaygggtcctttg

SEQ ID NO: 13505 - DNA, 21 bp, Homo sapiens
actcaacagayattcatcact

SEQ ID NO: 13506 - DNA, 21 bp, Homo sapiens
gagggctagcrtgccagatgc

SEQ ID NO: 13507 - DNA, 21 bp, Homo sapiens
ggcagacatcrttgttttatt

SEQ ID NO: 13508 - DNA, 21 bp, Homo sapiens
gactgtttgakcaggaatggt

SEQ ID NO: 13509 - DNA, 21 bp, Homo sapiens
taaggcaggtrgctcgctaat

SEQ ID NO: 13510 - DNA, 21 bp, Homo sapiens
ataaaactagmattcttgtta

SEQ ID NO: 13511 - DNA, 21 bp, Homo sapiens
atgtatttagyggcttttttt

SEQ ID NO: 13512 - DNA, 21 bp, Homo sapiens
tctgtttaaaratatgtcaaa

SEQ ID NO: 13513 - DNA, 21 bp, Homo sapiens
ggttggctttytatgatgttt

SEQ ID NO: 13514 - DNA, 21 bp, Homo sapiens
acaatgatttstaagcacctg

SEQ ID NO: 13515 - DNA, 21 bp, Homo sapiens
cttccatacckctggagctgg

SEQ ID NO: 13516 - DNA, 21 bp, Homo sapiens
atacaaacatraaagggcaat

SEQ ID NO: 13517 - DNA, 21 bp, Homo sapiens
acacaggaaaygatcaaaaga

SEQ ID NO: 13518 - DNA, 21 bp, Homo sapiens
aattccgccgmaaggcaaatt

SEQ ID NO: 13519 - DNA, 21 bp, Homo sapiens
gggaagatgtrggagcatact

SEQ ID NO: 13520 - DNA, 21 bp, Homo sapiens
tacgttttccycgaagcatgg

SEQ ID NO: 13521 - DNA, 21 bp, Homo sapiens
atggtatttayggtatatggt

SEQ ID NO: 13522 - DNA, 21 bp, Homo sapiens
gaaagggtttrtcaatctcgt

SEQ ID NO: 13523 - DNA, 21 bp, Homo sapiens
ctcacccctgrcatgtggtgt

SEQ ID NO: 13524 - DNA, 21 bp, Homo sapiens
ctcatttggargcctactctt

SEQ ID NO: 13525 - DNA, 21 bp, Homo sapiens
cacctgtgacwctcacttcaa

SEQ ID NO: 13526 - DNA, 21 bp, Homo sapiens
aatattgacaracttatttaa

SEQ ID NO: 13527 - DNA, 21 bp, Homo sapiens
tgtgataaagygagaaataat

SEQ ID NO: 13528 - DNA, 21 bp, Homo sapiens
ccaaaatgacyactgctatga

SEQ ID NO: 13529 - DNA, 21 bp, Homo sapiens
ttggtaaagaygatgactgct

SEQ ID NO: 13530 - DNA, 21 bp, Homo sapiens
caaaattaaartaacaacttt

SEQ ID NO: 13531 - DNA, 21 bp, Homo sapiens
gttttgttttkggaagaacta

SEQ ID NO: 13532 - DNA, 21 bp, Homo sapiens
gttctaccatrtcacaccaaa

SEQ ID NO: 13533 - DNA, 21 bp, Homo sapiens
tatcatctacrttaactgctt

SEQ ID NO: 13534 - DNA, 21 bp, Homo sapiens
attcatgctcrgaattttcag

SEQ ID NO: 13535 - DNA, 21 bp, Homo sapiens
tcacattttaragggctgacc

SEQ ID NO: 13536 - DNA, 21 bp, Homo sapiens
taaggaaaacrggactactct

SEQ ID NO: 13537 - DNA, 21 bp, Homo sapiens
aataataggaygtgtgatgat

SEQ ID NO: 13538 - DNA, 21 bp, Homo sapiens
atggagtatgmtttagattta

SEQ ID NO: 13539 - DNA, 21 bp, Homo sapiens
actgcttgggkctttcctcta

SEQ ID NO: 13540 - DNA, 21 bp, Homo sapiens
ctgaagtttaytgttcttact

SEQ ID NO: 13541 - DNA, 21 bp, Homo sapiens
tatgagccctrtaaatgttat

SEQ ID NO: 13542 - DNA, 21 bp, Homo sapiens
gcagttttatrcagtcttata

SEQ ID NO: 13543 - DNA, 21 bp, Homo sapiens
tggctgattartcagaggatg

SEQ ID NO: 13544 - DNA, 21 bp, Homo sapiens
aattgtcaagkgagtccataa

SEQ ID NO: 13545 - DNA, 21 bp, Homo sapiens
aaattgcagaracaaggaagg

SEQ ID NO: 13546 - DNA, 21 bp, Homo sapiens
aaagaagaagscatggccaaa

SEQ ID NO: 13547 - DNA, 21 bp, Homo sapiens
tctgggtctcygtattcttct

SEQ ID NO: 13548 - DNA, 21 bp, Homo sapiens
taacaatcaaygagttagtaa

SEQ ID NO: 13549 - DNA, 21 bp, Homo sapiens
aatgcatgtaycttgatgata

SEQ ID NO: 13550 - DNA, 21 bp, Homo sapiens
tttccttttamttatgaccac

SEQ ID NO: 13551 - DNA, 21 bp, Homo sapiens
tgacaccagcragtttgtgag

SEQ ID NO: 13552 - DNA, 21 bp, Homo sapiens
ataacctaccrgctgtatgga

SEQ ID NO: 13553 - DNA, 21 bp, Homo sapiens
cctggcatagraaaatagaat

SEQ ID NO: 13554 - DNA, 21 bp, Homo sapiens
acatttacacmagacttgaaa

SEQ ID NO: 13555 - DNA, 21 bp, Homo sapiens
agataccctcmtctactctgg

SEQ ID NO: 13556 - DNA, 21 bp, Homo sapiens
cttggatcaaygaactgggca

SEQ ID NO: 13557 - DNA, 21 bp, Homo sapiens
tctaggttttwtccttactga

SEQ ID NO: 13558 - DNA, 21 bp, Homo sapiens
tgagatcaaaytcagtcctgc

SEQ ID NO: 13559 - DNA, 21 bp, Homo sapiens
aatgtatgcartttgttgact

SEQ ID NO: 13560 - DNA, 21 bp, Homo sapiens
tgtaaaactgrttagtgtgtg

SEQ ID NO: 13561 - DNA, 21 bp, Homo sapiens
caagaaggcargttggacaca

SEQ ID NO: 13562 - DNA, 21 bp, Homo sapiens
ttttgaacttyggtgactttt

SEQ ID NO: 13563 - DNA, 21 bp, Homo sapiens
tatatctagamgttaacttga

SEQ ID NO: 13564 - DNA, 21 bp, Homo sapiens
atattgaaatratcccgaggg

SEQ ID NO: 13565 - DNA, 21 bp, Homo sapiens
gctatgtcttygaagcccctc

SEQ ID NO: 13566 - DNA, 21 bp, Homo sapiens
ccgttgtttaraagccaggct

SEQ ID NO: 13567 - DNA, 21 bp, Homo sapiens
gatccatggcygccagctctc

SEQ ID NO: 13568 - DNA, 21 bp, Homo sapiens
cataatgactytctctataca

SEQ ID NO: 13569 - DNA, 21 bp, Homo sapiens
gggaagaacakttctttaggt

SEQ ID NO: 13570 - DNA, 21 bp, Homo sapiens
gtactaccaasaatatacagt

SEQ ID NO: 13571 - DNA, 21 bp, Homo sapiens
tgggttgttaycaagtatgac

SEQ ID NO: 13572 - DNA, 21 bp, Homo sapiens
gagtatgatayattcatttta

SEQ ID NO: 13573 - DNA, 21 bp, Homo sapiens
ggtgtaattayctgggatcat

SEQ ID NO: 13574 - DNA, 21 bp, Homo sapiens
atacgttctcmctggaaaaga

SEQ ID NO: 13575 - DNA, 21 bp, Homo sapiens
tactgatgtcrtattgattgc

SEQ ID NO: 13576 - DNA, 21 bp, Homo sapiens
taaacttatayggaattgtag

SEQ ID NO: 13577 - DNA, 21 bp, Homo sapiens
gtttttcttayacacactagt

SEQ ID NO: 13578 - DNA, 21 bp, Homo sapiens
tgacagtgtcraagttggaaa

SEQ ID NO: 13579 - DNA, 21 bp, Homo sapiens
ctccttcccaytgggtctcac

SEQ ID NO: 13580 - DNA, 21 bp, Homo sapiens
cttctcatgartaatagaaac

SEQ ID NO: 13581 - DNA, 21 bp, Homo sapiens
atatgtccctkcttgcccagg

SEQ ID NO: 13582 - DNA, 21 bp, Homo sapiens
ctgaggtttcytggttcactc

SEQ ID NO: 13583 - DNA, 21 bp, Homo sapiens
aggcaataagmtggataacta

SEQ ID NO: 13584 - DNA, 21 bp, Homo sapiens
tcctctttctscctacggact

SEQ ID NO: 13585 - DNA, 21 bp, Homo sapiens
gatgcatgacrgtacttagag

SEQ ID NO: 13586 - DNA, 21 bp, Homo sapiens
caacgaacctraaaatcaccc

SEQ ID NO: 13587 - DNA, 21 bp, Homo sapiens
ctgaggatctrtctgtctcaa

SEQ ID NO: 13588 - DNA, 21 bp, Homo sapiens
tcaggatgcaracagtcttag

SEQ ID NO: 13589 - DNA, 21 bp, Homo sapiens
tgtaaaattaytcattttggc

SEQ ID NO: 13590 - DNA, 21 bp, Homo sapiens
aacataattcwtcattctctt

SEQ ID NO: 13591 - DNA, 21 bp, Homo sapiens
tgttacaagaktggaaacttt

SEQ ID NO: 13592 - DNA, 21 bp, Homo sapiens
gtattaagtaygaagaaaaac

SEQ ID NO: 13593 - DNA, 21 bp, Homo sapiens
atgtgaaataygaaaaagact

SEQ ID NO: 13594 - DNA, 21 bp, Homo sapiens
cattacaatcstcacctgact

SEQ ID NO: 13595 - DNA, 21 bp, Homo sapiens
attttttcackcctctgcaga

SEQ ID NO: 13596 - DNA, 21 bp, Homo sapiens
gtccttctcakcaggtatcag

SEQ ID NO: 13597 - DNA, 21 bp, Homo sapiens
tttttctgggmcctcttggaa

SEQ ID NO: 13598 - DNA, 21 bp, Homo sapiens
ggtaagtgttsataagaaggt

SEQ ID NO: 13599 - DNA, 21 bp, Homo sapiens
taacaaaataraatgaagaac

SEQ ID NO: 13600 - DNA, 21 bp, Homo sapiens
acttgtttcarcttggcccct

SEQ ID NO: 13601 - DNA, 21 bp, Homo sapiens
gacatgtggaytctggtttag

SEQ ID NO: 13602 - DNA, 21 bp, Homo sapiens
gctttcccacrcatgcgggcc

SEQ ID NO: 13603 - DNA, 21 bp, Homo sapiens
ctggcaatgcygtaccacctt

SEQ ID NO: 13604 - DNA, 21 bp, Homo sapiens
tacctttgtcrtcacctggaa

SEQ ID NO: 13605 - DNA, 21 bp, Homo sapiens
gctatcaatgytctgctcaca

SEQ ID NO: 13606 - DNA, 21 bp, Homo sapiens
gtaaactggayttttgttctt

SEQ ID NO: 13607 - DNA, 21 bp, Homo sapiens
gggaagataakgcaaccactt

SEQ ID NO: 13608 - DNA, 21 bp, Homo sapiens
tccctgccatygtgctgaagg

SEQ ID NO: 13609 - DNA, 21 bp, Homo sapiens
cttggcatctytcctctccaa

SEQ ID NO: 13610 - DNA, 21 bp, Homo sapiens
aatttaaagakcgtgggctca

SEQ ID NO: 13611 - DNA, 21 bp, Homo sapiens
agttagcaggmttttacaaat

SEQ ID NO: 13612 - DNA, 21 bp, Homo sapiens
ggatgctggtygccattttgt

SEQ ID NO: 13613 - DNA, 21 bp, Homo sapiens
agatgccctgrggaaaactct

SEQ ID NO: 13614 - DNA, 21 bp, Homo sapiens
tctgtggtatygggaaggtag

SEQ ID NO: 13615 - DNA, 21 bp, Homo sapiens
tttggaaacasacaagtagga

SEQ ID NO: 13616 - DNA, 21 bp, Homo sapiens
atgaggagcaycttggcagcc

SEQ ID NO: 13617 - DNA, 21 bp, Homo sapiens
aatattctgcrtgtttggtta

SEQ ID NO: 13618 - DNA, 21 bp, Homo sapiens
atttgttagcyctgtaatgtt

SEQ ID NO: 13619 - DNA, 21 bp, Homo sapiens
cttttatggcrtaactgtctc

SEQ ID NO: 13620 - DNA, 21 bp, Homo sapiens
agccatgatgygcttatctgt

SEQ ID NO: 13621 - DNA, 21 bp, Homo sapiens
actaccaaccstgattatctc

SEQ ID NO: 13622 - DNA, 21 bp, Homo sapiens
tccacaccatrgcttggcagt

SEQ ID NO: 13623 - DNA, 21 bp, Homo sapiens
actagtccagktatattgtaa

SEQ ID NO: 13624 - DNA, 21 bp, Homo sapiens
gctaactgctwtatttaactt

SEQ ID NO: 13625 - DNA, 21 bp, Homo sapiens
catctctcagkggctctactg

SEQ ID NO: 13626 - DNA, 21 bp, Homo sapiens
taaacctgtaytccagatcct

SEQ ID NO: 13627 - DNA, 21 bp, Homo sapiens
ttcaacaaccrgtcccacata

SEQ ID NO: 13628 - DNA, 21 bp, Homo sapiens
acttcactgartacttgtgag

SEQ ID NO: 13629 - DNA, 21 bp, Homo sapiens
tctcaagattrtgtataaaag

SEQ ID NO: 13630 - DNA, 21 bp, Homo sapiens
atgagtggccrgtgttattaa

SEQ ID NO: 13631 - DNA, 21 bp, Homo sapiens
accagctcttraatgaataga

SEQ ID NO: 13632 - DNA, 21 bp, Homo sapiens
ctcaaattcaygtagttagtg

SEQ ID NO: 13633 - DNA, 21 bp, Homo sapiens
atcctccaaaytgtaattctt

SEQ ID NO: 13634 - DNA, 21 bp, Homo sapiens
tctaggagggygatgacattc

SEQ ID NO: 13635 - DNA, 21 bp, Homo sapiens
tggtacttackgctgccttta

SEQ ID NO: 13636 - DNA, 21 bp, Homo sapiens
ggaatacgaaraacttcaggc

SEQ ID NO: 13637 - DNA, 21 bp, Homo sapiens
ttgacagagasgattaacatt

SEQ ID NO: 13638 - DNA, 21 bp, Homo sapiens
taagtaaccgrtactggcagc

SEQ ID NO: 13639 - DNA, 21 bp, Homo sapiens
aggcttttgaytgcttggcta

SEQ ID NO: 13640 - DNA, 21 bp, Homo sapiens
tgcctgacatwccacagctag

SEQ ID NO: 13641 - DNA, 21 bp, Homo sapiens
tgtcactcctsagtacgaatt

SEQ ID NO: 13642 - DNA, 21 bp, Homo sapiens
aacccctagtygtaaaaggat

SEQ ID NO: 13643 - DNA, 21 bp, Homo sapiens
tgaggaaaagmaattgcccca

SEQ ID NO: 13644 - DNA, 21 bp, Homo sapiens
ctgggggacasagttttagtt

SEQ ID NO: 13645 - DNA, 21 bp, Homo sapiens
tgcataccatrtaattcagtg

SEQ ID NO: 13646 - DNA, 21 bp, Homo sapiens
ccatacacackttgcaataga

SEQ ID NO: 13647 - DNA, 21 bp, Homo sapiens
caaacaacaaycattttttgt

SEQ ID NO: 13648 - DNA, 21 bp, Homo sapiens
cacaaattgtycatcataaca

SEQ ID NO: 13649 - DNA, 21 bp, Homo sapiens
tacatcttcayctgtgctcta

SEQ ID NO: 13650 - DNA, 21 bp, Homo sapiens
tcaaggccacrtatttgtcac

SEQ ID NO: 13651 - DNA, 21 bp, Homo sapiens
ctgcacctctrctcttactga

SEQ ID NO: 13652 - DNA, 21 bp, Homo sapiens
cagagagaggyaagccatgtc

SEQ ID NO: 13653 - DNA, 21 bp, Homo sapiens
tctcataaccrggaaaataat

SEQ ID NO: 13654 - DNA, 21 bp, Homo sapiens
tcaaaccagastctgctaatg

SEQ ID NO: 13655 - DNA, 21 bp, Homo sapiens
ggacatgaatyactgggactc

SEQ ID NO: 13656 - DNA, 21 bp, Homo sapiens
ttaaaatatascaccaaaata

SEQ ID NO: 13657 - DNA, 21 bp, Homo sapiens
tcaggtaacamattgttgttc

SEQ ID NO: 13658 - DNA, 21 bp, Homo sapiens
caaaaatgacstgtatcctta

SEQ ID NO: 13659 - DNA, 21 bp, Homo sapiens
cgcatggggtragaagcaggg

SEQ ID NO: 13660 - DNA, 21 bp, Homo sapiens
ggtaaactacraggcctcaaa

SEQ ID NO: 13661 - DNA, 21 bp, Homo sapiens
tcctcttggaygcccttgggt

SEQ ID NO: 13662 - DNA, 21 bp, Homo sapiens
tacaatccacstgctcagtat

SEQ ID NO: 13663 - DNA, 21 bp, Homo sapiens
acatgggccayctgggtgcct

SEQ ID NO: 13664 - DNA, 21 bp, Homo sapiens
cttcaccaggrgaatgggtta

SEQ ID NO: 13665 - DNA, 21 bp, Homo sapiens
atataatatakagtaccaggc

SEQ ID NO: 13666 - DNA, 21 bp, Homo sapiens
tctcctggtayttttttcttt

SEQ ID NO: 13667 - DNA, 21 bp, Homo sapiens
gtagggagaasggtctgtatg

SEQ ID NO: 13668 - DNA, 21 bp, Homo sapiens
taacataggcrttgcaattct

SEQ ID NO: 13669 - DNA, 21 bp, Homo sapiens
tagagaatgcytgctctattt

SEQ ID NO: 13670 - DNA, 21 bp, Homo sapiens
ggaactaatcrgataggaggt

SEQ ID NO: 13671 - DNA, 21 bp, Homo sapiens
ctttggccccrgcaaaacttt

SEQ ID NO: 13672 - DNA, 21 bp, Homo sapiens
aacctccagawggaaaacagt

SEQ ID NO: 13673 - DNA, 21 bp, Homo sapiens
gaaaggaaggyatccagccct

SEQ ID NO: 13674 - DNA, 21 bp, Homo sapiens
gagctttaacrattgaacaga

SEQ ID NO: 13675 - DNA, 21 bp, Homo sapiens
aatctgaaacrgtcaagccat

SEQ ID NO: 13676 - DNA, 21 bp, Homo sapiens
ctgttgttgtstgatacggaa

SEQ ID NO: 13677 - DNA, 21 bp, Homo sapiens
ttctccagtgytgagtcccag

SEQ ID NO: 13678 - DNA, 21 bp, Homo sapiens
gttacttggcstctcttagat

SEQ ID NO: 13679 - DNA, 21 bp, Homo sapiens
attggaagggwacactgattt

SEQ ID NO: 13680 - DNA, 21 bp, Homo sapiens
gatttggactrtgactcactt

SEQ ID NO: 13681 - DNA, 21 bp, Homo sapiens
gaacagacttygaatagggtt

SEQ ID NO: 13682 - DNA, 21 bp, Homo sapiens
ctctcactttkgatactaatt

SEQ ID NO: 13683 - DNA, 21 bp, Homo sapiens
ggacatataakagaagctcaa

SEQ ID NO: 13684 - DNA, 21 bp, Homo sapiens
cagtttcttascatgctacgc

SEQ ID NO: 13685 - DNA, 21 bp, Homo sapiens
aatgcaaataycccaaagcac

SEQ ID NO: 13686 - DNA, 21 bp, Homo sapiens
gaaagggcatrttctcagaga

SEQ ID NO: 13687 - DNA, 21 bp, Homo sapiens
ttgatgtttcrggcccacatt

SEQ ID NO: 13688 - DNA, 21 bp, Homo sapiens
aatttgcaacytgttcagcag

SEQ ID NO: 13689 - DNA, 21 bp, Homo sapiens
caactttgctrtttttcactt

SEQ ID NO: 13690 - DNA, 21 bp, Homo sapiens
ggtgatttacrggagctcacc

SEQ ID NO: 13691 - DNA, 21 bp, Homo sapiens
ctcactatttygcctgcaatc

SEQ ID NO: 13692 - DNA, 21 bp, Homo sapiens
agttctaatgmgaatccaacc

SEQ ID NO: 13693 - DNA, 21 bp, Homo sapiens
gagctatcgcwcaacagattc

SEQ ID NO: 13694 - DNA, 21 bp, Homo sapiens
gaaagtgacarcctactcaaa

SEQ ID NO: 13695 - DNA, 21 bp, Homo sapiens
cttgatatccwtaacaatccc

SEQ ID NO: 13696 - DNA, 21 bp, Homo sapiens
acataggaggygagatgataa

SEQ ID NO: 13697 - DNA, 21 bp, Homo sapiens
caagacagtcrctatctatga

SEQ ID NO: 13698 - DNA, 21 bp, Homo sapiens
gtgaagaaaamgactactgct

SEQ ID NO: 13699 - DNA, 21 bp, Homo sapiens
atgttaaataygcatccaatt

SEQ ID NO: 13700 - DNA, 21 bp, Homo sapiens
tttagccgggyaacttctctt

SEQ ID NO: 13701 - DNA, 21 bp, Homo sapiens
agaaaattggyggctttctgg

SEQ ID NO: 13702 - DNA, 21 bp, Homo sapiens
tggaactaccrgaaagaaaaa

SEQ ID NO: 13703 - DNA, 21 bp, Homo sapiens
cctccttttgrcttggggagc

SEQ ID NO: 13704 - DNA, 21 bp, Homo sapiens
ttcattgagcrcttctgcgaa

SEQ ID NO: 13705 - DNA, 21 bp, Homo sapiens
ccgaagtgatwtggggccctt

SEQ ID NO: 13706 - DNA, 21 bp, Homo sapiens
tctgttcctargctcagggat

SEQ ID NO: 13707 - DNA, 21 bp, Homo sapiens
agtgtattaaragggctggag

SEQ ID NO: 13708 - DNA, 21 bp, Homo sapiens
tgtttcatcartgtcttttgg

SEQ ID NO: 13709 - DNA, 21 bp, Homo sapiens
tcctctcttayctttcacaag

SEQ ID NO: 13710 - DNA, 21 bp, Homo sapiens
gaagattctcraggatgaagg

SEQ ID NO: 13711 - DNA, 21 bp, Homo sapiens
tttcttgtctygctgattaac

SEQ ID NO: 13712 - DNA, 21 bp, Homo sapiens
atgttgtttaycaggcagcaa

SEQ ID NO: 13713 - DNA, 21 bp, Homo sapiens
gccataggcarattttcatac

SEQ ID NO: 13714 - DNA, 21 bp, Homo sapiens
atacatttccrcatttctagt

SEQ ID NO: 13715 - DNA, 21 bp, Homo sapiens
tgcttctgccrtgcgttttgc

SEQ ID NO: 13716 - DNA, 21 bp, Homo sapiens
gccgttaaacytggggcaatc

SEQ ID NO: 13717 - DNA, 21 bp, Homo sapiens
gtgagttaacygactcattga

SEQ ID NO: 13718 - DNA, 21 bp, Homo sapiens
gtttcagaacwgtttctcaac

SEQ ID NO: 13719 - DNA, 21 bp, Homo sapiens
gcgacgcacgyggtgcccatt

SEQ ID NO: 13720 - DNA, 21 bp, Homo sapiens
taagtgtaggktttatccact

SEQ ID NO: 13721 - DNA, 21 bp, Homo sapiens
tgttatcagcyatggttctga

SEQ ID NO: 13722 - DNA, 21 bp, Homo sapiens
caaatgagaartcagcttggg

SEQ ID NO: 13723 - DNA, 21 bp, Homo sapiens
aggggcactayacacacggtt

SEQ ID NO: 13724 - DNA, 21 bp, Homo sapiens
ggccctctccsgactcaagca

SEQ ID NO: 13725 - DNA, 21 bp, Homo sapiens
ctcaccaactmtttcctttgt

SEQ ID NO: 13726 - DNA, 21 bp, Homo sapiens
ttaagatgaaktctggatatt

SEQ ID NO: 13727 - DNA, 21 bp, Homo sapiens
gatgacaaggktttgcttcct

SEQ ID NO: 13728 - DNA, 21 bp, Homo sapiens
agagacattarcaattccaga

SEQ ID NO: 13729 - DNA, 21 bp, Homo sapiens
gagattctggmtccccatgtg

SEQ ID NO: 13730 - DNA, 21 bp, Homo sapiens
tctgtcccaarctctcttcag

SEQ ID NO: 13731 - DNA, 21 bp, Homo sapiens
ctcacggtttmagcttctgaa

SEQ ID NO: 13732 - DNA, 21 bp, Homo sapiens
aatgtcagacsttttgatttg

SEQ ID NO: 13733 - DNA, 21 bp, Homo sapiens
aaccttggacrtgatctcttt

SEQ ID NO: 13734 - DNA, 21 bp, Homo sapiens
ttgaagttatmcagcacttat

SEQ ID NO: 13735 - DNA, 21 bp, Homo sapiens
ctcataccctstctcctgacc

SEQ ID NO: 13736 - DNA, 21 bp, Homo sapiens
tctggtttgtmgcctgtacca

SEQ ID NO: 13737 - DNA, 21 bp, Homo sapiens
ggaggcttacmgtgctggacc

SEQ ID NO: 13738 - DNA, 21 bp, Homo sapiens
gtgatgttgcraagaagctgg

SEQ ID NO: 13739 - DNA, 21 bp, Homo sapiens
agtaatcccayagttaggaac

SEQ ID NO: 13740 - DNA, 21 bp, Homo sapiens
tgtttttcagwaggctacccc

SEQ ID NO: 13741 - DNA, 21 bp, Homo sapiens
agatgcttcaratgtgaaata

SEQ ID NO: 13742 - DNA, 21 bp, Homo sapiens
tgagcaattasttggtaaggg

SEQ ID NO: 13743 - DNA, 21 bp, Homo sapiens
agcaatggctmtccctggttg

SEQ ID NO: 13744 - DNA, 21 bp, Homo sapiens
ccaaactggcsctgaaaccca

SEQ ID NO: 13745 - DNA, 21 bp, Homo sapiens
atcacttttgsgcagttattt

SEQ ID NO: 13746 - DNA, 21 bp, Homo sapiens
tttaatatgtragaaatgtaa

SEQ ID NO: 13747 - DNA, 21 bp, Homo sapiens
atgccctcacragctgatgct

SEQ ID NO: 13748 - DNA, 21 bp, Homo sapiens
tcaagtgcctytgtgacattg

SEQ ID NO: 13749 - DNA, 21 bp, Homo sapiens
ccataggccasttaacagctt

SEQ ID NO: 13750 - DNA, 21 bp, Homo sapiens
gtgctagcctrttaataatat

SEQ ID NO: 13751 - DNA, 21 bp, Homo sapiens
aacagacattwcaaggatcct

SEQ ID NO: 13752 - DNA, 21 bp, Homo sapiens
gagttatacascttgttaatt

SEQ ID NO: 13753 - DNA, 21 bp, Homo sapiens
tgagctcaagmtggaccatgc

SEQ ID NO: 13754 - DNA, 21 bp, Homo sapiens
tttaagttgtygggcttggct

SEQ ID NO: 13755 - DNA, 21 bp, Homo sapiens
ttctggactargttatctatt

SEQ ID NO: 13756 - DNA, 21 bp, Homo sapiens
cagttcaaggstacctggcgt

SEQ ID NO: 13757 - DNA, 21 bp, Homo sapiens
ggccaatacarcatttaaaaa

SEQ ID NO: 13758 - DNA, 21 bp, Homo sapiens
ttaagtggggstgtcctgcaa

SEQ ID NO: 13759 - DNA, 21 bp, Homo sapiens
tgggcattatkagattcctag

SEQ ID NO: 13760 - DNA, 21 bp, Homo sapiens
cagaaaatgasgatgttttct

SEQ ID NO: 13761 - DNA, 21 bp, Homo sapiens
agttctgctcygatttgattc

SEQ ID NO: 13762 - DNA, 21 bp, Homo sapiens
ttgaatgaatrcgacaaactt

SEQ ID NO: 13763 - DNA, 21 bp, Homo sapiens
cctatgacacmgagccatctc

SEQ ID NO: 13764 - DNA, 21 bp, Homo sapiens
cagtgaagttrctctggttaa

SEQ ID NO: 13765 - DNA, 21 bp, Homo sapiens
taagtaacagyacaaggtaag

SEQ ID NO: 13766 - DNA, 21 bp, Homo sapiens
tgtaatgtacygtgcacaaag

SEQ ID NO: 13767 - DNA, 21 bp, Homo sapiens
cccctgtcacrgtcagtaaac

SEQ ID NO: 13768 - DNA, 21 bp, Homo sapiens
gactaagtgcsaagggcatgt

SEQ ID NO: 13769 - DNA, 21 bp, Homo sapiens
ctgccaagagyatgtgattgc

SEQ ID NO: 13770 - DNA, 21 bp, Homo sapiens
acagtggtctrtcattctgcc

SEQ ID NO: 13771 - DNA, 21 bp, Homo sapiens
gttgcctgccstttagtaaca

SEQ ID NO: 13772 - DNA, 21 bp, Homo sapiens
agaaggattgwttgatcattt

SEQ ID NO: 13773 - DNA, 21 bp, Homo sapiens
tggagttgacrtttgccctga

SEQ ID NO: 13774 - DNA, 21 bp, Homo sapiens
ggcactaagcstaataatgta

SEQ ID NO: 13775 - DNA, 21 bp, Homo sapiens
aataagtttayttgtttaggc

SEQ ID NO: 13776 - DNA, 21 bp, Homo sapiens
acagtggaaaragaccttcag

SEQ ID NO: 13777 - DNA, 21 bp, Homo sapiens
ttaatgaatayagtaaaatgt

SEQ ID NO: 13778 - DNA, 21 bp, Homo sapiens
taatcttttcrgaacccagag

SEQ ID NO: 13779 - DNA, 21 bp, Homo sapiens
aagcaaatgtyggctgaccct

SEQ ID NO: 13780 - DNA, 21 bp, Homo sapiens
agcagagattygtcctcgccg

SEQ ID NO: 13781 - DNA, 21 bp, Homo sapiens
attttgatggyaggcgcatta

SEQ ID NO: 13782 - DNA, 21 bp, Homo sapiens
cttcaatattrttattgccaa

SEQ ID NO: 13783 - DNA, 21 bp, Homo sapiens
tacacccttaygctgatggca

SEQ ID NO: 13784 - DNA, 21 bp, Homo sapiens
tggcaaaattrcttttctttg

SEQ ID NO: 13785 - DNA, 21 bp, Homo sapiens
atggggatgartaaacaggtt

SEQ ID NO: 13786 - DNA, 21 bp, Homo sapiens
gctggcattgyaggtgtctcg

SEQ ID NO: 13787 - DNA, 21 bp, Homo sapiens
aaagaattgtkagtgactaga

SEQ ID NO: 13788 - DNA, 21 bp, Homo sapiens
tgattttcaarcattgaacct

SEQ ID NO: 13789 - DNA, 21 bp, Homo sapiens
agcctcctgtrgccatacagc

SEQ ID NO: 13790 - DNA, 21 bp, Homo sapiens
tgagtacattyagctgatcat

SEQ ID NO: 13791 - DNA, 21 bp, Homo sapiens
tatgcaagagstgaaattaat

SEQ ID NO: 13792 - DNA, 21 bp, Homo sapiens
gagtaccactscataaaagga

SEQ ID NO: 13793 - DNA, 21 bp, Homo sapiens
gttctagatcrtacttggcat

SEQ ID NO: 13794 - DNA, 21 bp, Homo sapiens
tctgaacccascacatggaaa

SEQ ID NO: 13795 - DNA, 21 bp, Homo sapiens
atactcctaaycctctagagc

SEQ ID NO: 13796 - DNA, 21 bp, Homo sapiens
agtgaggtggygctatagtag

SEQ ID NO: 13797 - DNA, 21 bp, Homo sapiens
ggttctttttrgtagatggta

SEQ ID NO: 13798 - DNA, 21 bp, Homo sapiens
acacctaacaygataattagt

SEQ ID NO: 13799 - DNA, 21 bp, Homo sapiens
aaggaaggctkgaagccaaag

SEQ ID NO: 13800 - DNA, 21 bp, Homo sapiens
actagagagayagaaataatg

SEQ ID NO: 13801 - DNA, 21 bp, Homo sapiens
acatacacacrgagatgggaa

SEQ ID NO: 13802 - DNA, 21 bp, Homo sapiens
acactaccacrtactaactgt

SEQ ID NO: 13803 - DNA, 21 bp, Homo sapiens
tcaaataccamcatatttcat

SEQ ID NO: 13804 - DNA, 21 bp, Homo sapiens
agttttagtcwtgtaaacttt

SEQ ID NO: 13805 - DNA, 21 bp, Homo sapiens
cttctcctgtsactagaagga

SEQ ID NO: 13806 - DNA, 21 bp, Homo sapiens
tagcactagayaccaaactct

SEQ ID NO: 13807 - DNA, 21 bp, Homo sapiens
aatctatttayatatctaacc

SEQ ID NO: 13808 - DNA, 21 bp, Homo sapiens
tggtttatcakaatcaaagtt

SEQ ID NO: 13809 - DNA, 21 bp, Homo sapiens
tggagagctastagggaggag

SEQ ID NO: 13810 - DNA, 21 bp, Homo sapiens
tgtttttactwaacaagttca

SEQ ID NO: 13811 - DNA, 21 bp, Homo sapiens
cagtaccaagrttattaaatt

SEQ ID NO: 13812 - DNA, 21 bp, Homo sapiens
cttcacagttygggaacttac

SEQ ID NO: 13813 - DNA, 21 bp, Homo sapiens
tgaaggcttasttacagttaa

SEQ ID NO: 13814 - DNA, 21 bp, Homo sapiens
aatttatcatyatcagtagaa

SEQ ID NO: 13815 - DNA, 21 bp, Homo sapiens
aacagaatgtrtctcctctgc

SEQ ID NO: 13816 - DNA, 21 bp, Homo sapiens
ttgactttctstcatcattag

SEQ ID NO: 13817 - DNA, 21 bp, Homo sapiens
gaatgatcctytatttttgta

SEQ ID NO: 13818 - DNA, 21 bp, Homo sapiens
aaaacctttgrgagtaataat

SEQ ID NO: 13819 - DNA, 21 bp, Homo sapiens
actgcttacaraatagaagtc

SEQ ID NO: 13820 - DNA, 21 bp, Homo sapiens
agctcagaaartaaaccttac

SEQ ID NO: 13821 - DNA, 21 bp, Homo sapiens
atctacatcaytgctgggaac

SEQ ID NO: 13822 - DNA, 21 bp, Homo sapiens
cctccgcagtsaacttcactt

SEQ ID NO: 13823 - DNA, 21 bp, Homo sapiens
tttacaatgaygatctcttga

SEQ ID NO: 13824 - DNA, 21 bp, Homo sapiens
aagttgtccayctgattgttc

SEQ ID NO: 13825 - DNA, 21 bp, Homo sapiens
tcatcatcacmatctctttaa

SEQ ID NO: 13826 - DNA, 21 bp, Homo sapiens
ctttcaataakcctacaactg

SEQ ID NO: 13827 - DNA, 21 bp, Homo sapiens
ggaaatctaayctcacatcta

SEQ ID NO: 13828 - DNA, 21 bp, Homo sapiens
cacagacacarcagtgatatg

SEQ ID NO: 13829 - DNA, 21 bp, Homo sapiens
tacctacttgkagaattcaca

SEQ ID NO: 13830 - DNA, 21 bp, Homo sapiens
atctctaacgwcaagtaggct

SEQ ID NO: 13831 - DNA, 21 bp, Homo sapiens
gctgggacctygataagaaat

SEQ ID NO: 13832 - DNA, 21 bp, Homo sapiens
atataaaggcrtaccttggag

SEQ ID NO: 13833 - DNA, 21 bp, Homo sapiens
ttaagtgtgtrcatgatgaca

SEQ ID NO: 13834 - DNA, 21 bp, Homo sapiens
atatataacasagcacacgtt

SEQ ID NO: 13835 - DNA, 21 bp, Homo sapiens
tgtcacttagrtaagtatcta

SEQ ID NO: 13836 - DNA, 21 bp, Homo sapiens
cccaggttcaragtaaattct

SEQ ID NO: 13837 - DNA, 21 bp, Homo sapiens
ttataagaaaygtatttttat

SEQ ID NO: 13838 - DNA, 21 bp, Homo sapiens
cttgtgaataracttcacggt

SEQ ID NO: 13839 - DNA, 21 bp, Homo sapiens
atacagcatakatagcaaata

SEQ ID NO: 13840 - DNA, 21 bp, Homo sapiens
tacttgaggckttgcataaat

SEQ ID NO: 13841 - DNA, 21 bp, Homo sapiens
atgccctaagytgtactgcta

SEQ ID NO: 13842 - DNA, 21 bp, Homo sapiens
ggtgagatcamccatagctgt

SEQ ID NO: 13843 - DNA, 21 bp, Homo sapiens
cactcataaarttaaacttat

SEQ ID NO: 13844 - DNA, 21 bp, Homo sapiens
attagctgacktatcaaaaaa

SEQ ID NO: 13845 - DNA, 21 bp, Homo sapiens
taatgcttatyttatgcaaac

SEQ ID NO: 13846 - DNA, 21 bp, Homo sapiens
tgatttctctrttggtgatct

SEQ ID NO: 13847 - DNA, 21 bp, Homo sapiens
caccagggcayaagcagattc

SEQ ID NO: 13848 - DNA, 21 bp, Homo sapiens
aactgctaackaaaaatgtgt

SEQ ID NO: 13849 - DNA, 21 bp, Homo sapiens
taattagcttmagagaactta

SEQ ID NO: 13850 - DNA, 21 bp, Homo sapiens
tgattcaaaaytgtccatgag

SEQ ID NO: 13851 - DNA, 21 bp, Homo sapiens
ctgatacagaytttatacctt

SEQ ID NO: 13852 - DNA, 21 bp, Homo sapiens
ctacaagatckgaccactgcg

SEQ ID NO: 13853 - DNA, 21 bp, Homo sapiens
gctaagggtcraagtatacta

SEQ ID NO: 13854 - DNA, 21 bp, Homo sapiens
ctatatggtaytcatttctta

SEQ ID NO: 13855 - DNA, 21 bp, Homo sapiens
ctgagcagccrcttcttcaga

SEQ ID NO: 13856 - DNA, 21 bp, Homo sapiens
aagaaagggcsgggagagcgg

SEQ ID NO: 13857 - DNA, 21 bp, Homo sapiens
acttctgagcrtacggaaata

SEQ ID NO: 13858 - DNA, 21 bp, Homo sapiens
tggatgttgtkgctgccaaat

SEQ ID NO: 13859 - DNA, 21 bp, Homo sapiens
ataaccagacrtaattaaact

SEQ ID NO: 13860 - DNA, 21 bp, Homo sapiens
tctgactgttkggtctgagat

SEQ ID NO: 13861 - DNA, 21 bp, Homo sapiens
aatcagtcctwtatgtgtgtc

SEQ ID NO: 13862 - DNA, 21 bp, Homo sapiens
aatgcccaagkttgcccttaa

SEQ ID NO: 13863 - DNA, 21 bp, Homo sapiens
gcactaagccyccggacttct

SEQ ID NO: 13864 - DNA, 21 bp, Homo sapiens
tttgctgccargacccttgtt

SEQ ID NO: 13865 - DNA, 21 bp, Homo sapiens
tcatggggttktttggaatca

SEQ ID NO: 13866 - DNA, 21 bp, Homo sapiens
tggttttactsttctctcagg

SEQ ID NO: 13867 - DNA, 21 bp, Homo sapiens
atttcccatascaggatcttt

SEQ ID NO: 13868 - DNA, 21 bp, Homo sapiens
ctcacaacccsgtaagctgtg

SEQ ID NO: 13869 - DNA, 21 bp, Homo sapiens
tccccagtttrcaaaaggcct

SEQ ID NO: 13870 - DNA, 21 bp, Homo sapiens
ggtcctgacarctgagagcat

SEQ ID NO: 13871 - DNA, 21 bp, Homo sapiens
ttttggagctstttggttaca

SEQ ID NO: 13872 - DNA, 21 bp, Homo sapiens
aaggtgaagawccaaacattc

SEQ ID NO: 13873 - DNA, 21 bp, Homo sapiens
tgagctgtgakgtctcctccc

SEQ ID NO: 13874 - DNA, 21 bp, Homo sapiens
aagtgttcctmtgacaaaata

SEQ ID NO: 13875 - DNA, 21 bp, Homo sapiens
atggtggacartgaagccatc

SEQ ID NO: 13876 - DNA, 21 bp, Homo sapiens
ataagagattyctggtgccaa

SEQ ID NO: 13877 - DNA, 21 bp, Homo sapiens
ttgagtaagarcccaagtgct

SEQ ID NO: 13878 - DNA, 21 bp, Homo sapiens
tctttgtgatyagggtttctt

SEQ ID NO: 13879 - DNA, 21 bp, Homo sapiens
ttcaaggtcawttcaagacat

SEQ ID NO: 13880 - DNA, 21 bp, Homo sapiens
tccatttacaktttaactcaa

SEQ ID NO: 13881 - DNA, 21 bp, Homo sapiens
atctgtggaasctaaatccta

SEQ ID NO: 13882 - DNA, 21 bp, Homo sapiens
caggaataagwccacacacat

SEQ ID NO: 13883 - DNA, 21 bp, Homo sapiens
gtaccatttgyggcatactat

SEQ ID NO: 13884 - DNA, 21 bp, Homo sapiens
atcatgctccrggcacaagcc

SEQ ID NO: 13885 - DNA, 21 bp, Homo sapiens
ctggcattcartagagaagca

SEQ ID NO: 13886 - DNA, 21 bp, Homo sapiens
agtgctgacargatagccctc

SEQ ID NO: 13887 - DNA, 21 bp, Homo sapiens
aagtatgggawgatagttgaa

SEQ ID NO: 13888 - DNA, 21 bp, Homo sapiens
aaatccaaagragaggaaatt

SEQ ID NO: 13889 - DNA, 21 bp, Homo sapiens
atgtgtaatgyttttcacttt

SEQ ID NO: 13890 - DNA, 21 bp, Homo sapiens
ttcctcctacyagaaaccaag

SEQ ID NO: 13891 - DNA, 21 bp, Homo sapiens
gggagtggaakgtgtagtatg

SEQ ID NO: 13892 - DNA, 21 bp, Homo sapiens
caaaccatagyatttacctat

SEQ ID NO: 13893 - DNA, 21 bp, Homo sapiens
atttatgatgmgtaaaactga

SEQ ID NO: 13894 - DNA, 21 bp, Homo sapiens
acaccaagagrttcacttatt

SEQ ID NO: 13895 - DNA, 21 bp, Homo sapiens
ttcttccattyatgatacatt

SEQ ID NO: 13896 - DNA, 21 bp, Homo sapiens
agttattcctyatggaagcat

SEQ ID NO: 13897 - DNA, 21 bp, Homo sapiens
aaaataaatcrtaacagtcat

SEQ ID NO: 13898 - DNA, 21 bp, Homo sapiens
tcttatgtctrtgaaaaaaga

SEQ ID NO: 13899 - DNA, 21 bp, Homo sapiens
aaacaccttcygagggatcaa

SEQ ID NO: 13900 - DNA, 21 bp, Homo sapiens
gcctcaggtcrtgacaactgg

SEQ ID NO: 13901 - DNA, 21 bp, Homo sapiens
accttctgacrtgaaaaacag

SEQ ID NO: 13902 - DNA, 21 bp, Homo sapiens
ctccatttacwggaacgacgt

SEQ ID NO: 13903 - DNA, 21 bp, Homo sapiens
agagccagctsaagtctaatg

SEQ ID NO: 13904 - DNA, 21 bp, Homo sapiens
tggtgcaaaastaaaaaactg

SEQ ID NO: 13905 - DNA, 21 bp, Homo sapiens
tttttgctttyttccacgtga

SEQ ID NO: 13906 - DNA, 21 bp, Homo sapiens
ccggatgcagyatctcagccc

SEQ ID NO: 13907 - DNA, 21 bp, Homo sapiens
accgatacacyctgctgcctc

SEQ ID NO: 13908 - DNA, 21 bp, Homo sapiens
gtaatgctttwttctcaaata

SEQ ID NO: 13909 - DNA, 21 bp, Homo sapiens
cgtcggtggcyacagcgggaa

SEQ ID NO: 13910 - DNA, 21 bp, Homo sapiens
tggagagggtrcagcacagac

SEQ ID NO: 13911 - DNA, 21 bp, Homo sapiens
cttcaatgtcrttactttcaa

SEQ ID NO: 13912 - DNA, 21 bp, Homo sapiens
gtttacttctrattttgactt

SEQ ID NO: 13913 - DNA, 21 bp, Homo sapiens
gtcggctttayctcttgcaaa

SEQ ID NO: 13914 - DNA, 21 bp, Homo sapiens
tgtgtctcatycagagatatc

SEQ ID NO: 13915 - DNA, 21 bp, Homo sapiens
gcctttgccgrtaagagtcct

SEQ ID NO: 13916 - DNA, 21 bp, Homo sapiens
actcgtctgtsagcccagaga

SEQ ID NO: 13917 - DNA, 21 bp, Homo sapiens
aaggctttctrttttttattt

SEQ ID NO: 13918 - DNA, 21 bp, Homo sapiens
ttcatgtgctsctataggagg

SEQ ID NO: 13919 - DNA, 21 bp, Homo sapiens
cccaaggtaartcctggacgg

SEQ ID NO: 13920 - DNA, 21 bp, Homo sapiens
tgccatcttcycaccccactc

SEQ ID NO: 13921 - DNA, 21 bp, Homo sapiens
gaaatcgagcygccacggggc

SEQ ID NO: 13922 - DNA, 21 bp, Homo sapiens
tgctggggctygctcggcttc

SEQ ID NO: 13923 - DNA, 21 bp, Homo sapiens
acccacccccyacactcctct

SEQ ID NO: 13924 - DNA, 21 bp, Homo sapiens
tggcaggtctrtgtgggcact

SEQ ID NO: 13925 - DNA, 21 bp, Homo sapiens
ctagttgtttkctatgcacat

SEQ ID NO: 13926 - DNA, 21 bp, Homo sapiens
ggccatggtcrtgaaaagggt

SEQ ID NO: 13927 - DNA, 21 bp, Homo sapiens
cgtgtaatccsagcaattgtg

SEQ ID NO: 13928 - DNA, 21 bp, Homo sapiens
tttaaacagaygccctcaggt

SEQ ID NO: 13929 - DNA, 21 bp, Homo sapiens
ccacagagcgycaatgggagc

SEQ ID NO: 13930 - DNA, 21 bp, Homo sapiens
agactcatttyggagccactc

SEQ ID NO: 13931 - DNA, 21 bp, Homo sapiens
tgtttccgcgyggacgtggaa

SEQ ID NO: 13932 - DNA, 21 bp, Homo sapiens
atatgcaaatmatgctgccat

SEQ ID NO: 13933 - DNA, 21 bp, Homo sapiens
tggaacaatgkatttgcagca

SEQ ID NO: 13934 - DNA, 21 bp, Homo sapiens
gcaatcaacakgtattattct

SEQ ID NO: 13935 - DNA, 21 bp, Homo sapiens
atgctagcccwgtgttctgta

SEQ ID NO: 13936 - DNA, 21 bp, Homo sapiens
gaaaatagtgmatgtctaaac

SEQ ID NO: 13937 - DNA, 21 bp, Homo sapiens
gagagattccrgttttcaact

SEQ ID NO: 13938 - DNA, 21 bp, Homo sapiens
atgaatactcrctgaatttta

SEQ ID NO: 13939 - DNA, 21 bp, Homo sapiens
gaaccaagtcrtggcttgcaa

SEQ ID NO: 13940 - DNA, 21 bp, Homo sapiens
ctcatcccackcagataaaga

SEQ ID NO: 13941 - DNA, 21 bp, Homo sapiens
gctcttctttwtacccttgag

SEQ ID NO: 13942 - DNA, 21 bp, Homo sapiens
gccatcctctrgaagacaggc

SEQ ID NO: 13943 - DNA, 21 bp, Homo sapiens
cacatctgtckgttatctgtc

SEQ ID NO: 13944 - DNA, 21 bp, Homo sapiens
tatggcaaaartagaaataag

SEQ ID NO: 13945 - DNA, 21 bp, Homo sapiens
ttggatcatgrcttcataact

SEQ ID NO: 13946 - DNA, 21 bp, Homo sapiens
ctttggcagaycttacctagt

SEQ ID NO: 13947 - DNA, 21 bp, Homo sapiens
agccaactatytataaatgtc

SEQ ID NO: 13948 - DNA, 21 bp, Homo sapiens
acatgggttcygggtccccat

SEQ ID NO: 13949 - DNA, 21 bp, Homo sapiens
gtgttattacycattcagtga

SEQ ID NO: 13950 - DNA, 21 bp, Homo sapiens
agaccaaagcrcctatcacga

SEQ ID NO: 13951 - DNA, 21 bp, Homo sapiens
tccaaatacargcagagactc

SEQ ID NO: 13952 - DNA, 21 bp, Homo sapiens
gcttctttttwaaatcaacat

SEQ ID NO: 13953 - DNA, 21 bp, Homo sapiens
gaagccctagygtggcttcct

SEQ ID NO: 13954 - DNA, 21 bp, Homo sapiens
attttaccackgcagatagaa

SEQ ID NO: 13955 - DNA, 21 bp, Homo sapiens
ggtgcctgcasttcacttacg

SEQ ID NO: 13956 - DNA, 21 bp, Homo sapiens
caaatgctcayttggaatcat

SEQ ID NO: 13957 - DNA, 21 bp, Homo sapiens
ttggggtggarattgacccta

SEQ ID NO: 13958 - DNA, 21 bp, Homo sapiens
gcttcgcactrcacaactaca

SEQ ID NO: 13959 - DNA, 21 bp, Homo sapiens
gtgacatgacmagtgagcctg

SEQ ID NO: 13960 - DNA, 21 bp, Homo sapiens
ggccaggcctygatccttcct

SEQ ID NO: 13961 - DNA, 21 bp, Homo sapiens
tcgagcttcaytgtggcccct

SEQ ID NO: 13962 - DNA, 21 bp, Homo sapiens
tcgtggcaggyggctgggcgg

SEQ ID NO: 13963 - DNA, 21 bp, Homo sapiens
atctcctgttyattttgtgtg

SEQ ID NO: 13964 - DNA, 21 bp, Homo sapiens
aatatctgtartaaaaccaat

SEQ ID NO: 13965 - DNA, 21 bp, Homo sapiens
tgctgcctaasactgtcatca

SEQ ID NO: 13966 - DNA, 21 bp, Homo sapiens
agacttgtctrtgcctttgac

SEQ ID NO: 13967 - DNA, 21 bp, Homo sapiens
taatccatgcygttgtgtagg

SEQ ID NO: 13968 - DNA, 21 bp, Homo sapiens
ctgagagcagrcactttcatt

SEQ ID NO: 13969 - DNA, 21 bp, Homo sapiens
cttggtaactrcaagggcctc

SEQ ID NO: 13970 - DNA, 21 bp, Homo sapiens
actgagggaaragtaatagaa

SEQ ID NO: 13971 - DNA, 21 bp, Homo sapiens
gtttgaccaarttgcaatcac

SEQ ID NO: 13972 - DNA, 21 bp, Homo sapiens
ggagaggggtrtaagcggaag

SEQ ID NO: 13973 - DNA, 21 bp, Homo sapiens
cttttattaamctttccagag

SEQ ID NO: 13974 - DNA, 21 bp, Homo sapiens
tcagcaactgmcttcagggta

SEQ ID NO: 13975 - DNA, 21 bp, Homo sapiens
tgaagtgtccrccgtttatat

SEQ ID NO: 13976 - DNA, 21 bp, Homo sapiens
agcaagggatraagaaaaagg

SEQ ID NO: 13977 - DNA, 21 bp, Homo sapiens
ttttactttcyaaagccttaa

SEQ ID NO: 13978 - DNA, 21 bp, Homo sapiens
cctgctttttyagattagtca

SEQ ID NO: 13979 - DNA, 21 bp, Homo sapiens
tttggtaacaytggcattgct

SEQ ID NO: 13980 - DNA, 21 bp, Homo sapiens
caaccttgcamacttctccag

SEQ ID NO: 13981 - DNA, 21 bp, Homo sapiens
actgattgcayatttgggtga

SEQ ID NO: 13982 - DNA, 21 bp, Homo sapiens
acgtagatatrtgtagagctg

SEQ ID NO: 13983 - DNA, 21 bp, Homo sapiens
ctaggacatgyaacactgcca

SEQ ID NO: 13984 - DNA, 21 bp, Homo sapiens
aattcattttsacaagactgg

SEQ ID NO: 13985 - DNA, 21 bp, Homo sapiens
caaacctttcratgtgaatgt

SEQ ID NO: 13986 - DNA, 21 bp, Homo sapiens
tagtaccctayatttgtatct

SEQ ID NO: 13987 - DNA, 21 bp, Homo sapiens
ataaaaccacytcttgaaata

SEQ ID NO: 13988 - DNA, 21 bp, Homo sapiens
attttagcagsctccattagc

SEQ ID NO: 13989 - DNA, 21 bp, Homo sapiens
cgcaggctctygcgtctttga

SEQ ID NO: 13990 - DNA, 21 bp, Homo sapiens
tattgacccayaagaaattgg

SEQ ID NO: 13991 - DNA, 21 bp, Homo sapiens
gggttcacacyctctctttta

SEQ ID NO: 13992 - DNA, 21 bp, Homo sapiens
agatcatgtaytttattgaca

SEQ ID NO: 13993 - DNA, 21 bp, Homo sapiens
gtttaatgacrttggacatta

SEQ ID NO: 13994 - DNA, 21 bp, Homo sapiens
gattataagtktcttgaagtc

SEQ ID NO: 13995 - DNA, 21 bp, Homo sapiens
aagtcttaaayttcacttttt

SEQ ID NO: 13996 - DNA, 21 bp, Homo sapiens
aggcacacacrgatctcctga

SEQ ID NO: 13997 - DNA, 21 bp, Homo sapiens
aattctatacratcacagcac

SEQ ID NO: 13998 - DNA, 21 bp, Homo sapiens
accaatctccyaggactgttg

SEQ ID NO: 13999 - DNA, 21 bp, Homo sapiens
agggcagtttyctgaacttaa

SEQ ID NO: 14000 - DNA, 21 bp, Homo sapiens
ttttttaaatyctaaatggct

SEQ ID NO: 14001 - DNA, 21 bp, Homo sapiens
cgaaactctaraagtccataa

SEQ ID NO: 14002 - DNA, 21 bp, Homo sapiens
ttaggtcataycaagtttttc

SEQ ID NO: 14003 - DNA, 21 bp, Homo sapiens
caaacactaaygatgacagta

SEQ ID NO: 14004 - DNA, 21 bp, Homo sapiens
ttaagctttastgcactttct

SEQ ID NO: 14005 - DNA, 21 bp, Homo sapiens
ccttgggaatkatttcgcttg

SEQ ID NO: 14006 - DNA, 21 bp, Homo sapiens
ctccttgagcrctccctgatt

SEQ ID NO: 14007 - DNA, 21 bp, Homo sapiens
gtttctcagartgtgtctcca

SEQ ID NO: 14008 - DNA, 21 bp, Homo sapiens
aaaaccctgcrgggaaaagaa

SEQ ID NO: 14009 - DNA, 21 bp, Homo sapiens
cctgtacttgygaaacacttg

SEQ ID NO: 14010 - DNA, 21 bp, Homo sapiens
aatatacaggsaattatagta

SEQ ID NO: 14011 - DNA, 21 bp, Homo sapiens
taatggtaatkgctacttgtc

SEQ ID NO: 14012 - DNA, 21 bp, Homo sapiens
aaaaacacacrtggggggcac

SEQ ID NO: 14013 - DNA, 21 bp, Homo sapiens
agtagggtagrcatgcttttg

SEQ ID NO: 14014 - DNA, 21 bp, Homo sapiens
aaaattagaaygttaccaaca

SEQ ID NO: 14015 - DNA, 21 bp, Homo sapiens
agattgagatmaagtgttgca

SEQ ID NO: 14016 - DNA, 21 bp, Homo sapiens
acttcatcatratacgggagt

SEQ ID NO: 14017 - DNA, 21 bp, Homo sapiens
aatcaccctcwtgataaagca

SEQ ID NO: 14018 - DNA, 21 bp, Homo sapiens
gaatgactatrgatcacttaa

SEQ ID NO: 14019 - DNA, 21 bp, Homo sapiens
gaaaaaggaarggaatcacaa

SEQ ID NO: 14020 - DNA, 21 bp, Homo sapiens
tgtgactaccrcccttaaaac

SEQ ID NO: 14021 - DNA, 21 bp, Homo sapiens
tctctaaacarcaaaggtttt

SEQ ID NO: 14022 - DNA, 21 bp, Homo sapiens
tcagcataccyttttgcactg

SEQ ID NO: 14023 - DNA, 21 bp, Homo sapiens
caaactctacsatagtcaaat

SEQ ID NO: 14024 - DNA, 21 bp, Homo sapiens
gtattaggctkttgtgtggac

SEQ ID NO: 14025 - DNA, 21 bp, Homo sapiens
acctttgaagkccttagtgtg

SEQ ID NO: 14026 - DNA, 21 bp, Homo sapiens
aagatattgtkccatctttcc

SEQ ID NO: 14027 - DNA, 21 bp, Homo sapiens
aatgttttctytcttgtactt

SEQ ID NO: 14028 - DNA, 21 bp, Homo sapiens
tgaactctatsactacacata

SEQ ID NO: 14029 - DNA, 21 bp, Homo sapiens
aagtctagaayttagtgaatt

SEQ ID NO: 14030 - DNA, 21 bp, Homo sapiens
tcctacaataytatctttccc

SEQ ID NO: 14031 - DNA, 21 bp, Homo sapiens
ttgttttttawaccttcattc

SEQ ID NO: 14032 - DNA, 21 bp, Homo sapiens
ttgaattgacwttttatttaa

SEQ ID NO: 14033 - DNA, 21 bp, Homo sapiens
tttattgatarcagtggtaga

SEQ ID NO: 14034 - DNA, 21 bp, Homo sapiens
attttactgtrattgtgcacc

SEQ ID NO: 14035 - DNA, 21 bp, Homo sapiens
tgagcagtccrtggtgaaact

SEQ ID NO: 14036 - DNA, 21 bp, Homo sapiens
aatggacaaarcacaggaatg

SEQ ID NO: 14037 - DNA, 21 bp, Homo sapiens
aacattgtcaytttgttggaa

SEQ ID NO: 14038 - DNA, 21 bp, Homo sapiens
ggaccagaaasaaggcagggt

SEQ ID NO: 14039 - DNA, 21 bp, Homo sapiens
ccttttaagarcattacacag

SEQ ID NO: 14040 - DNA, 21 bp, Homo sapiens
aaagacatttrcatttgaaat

SEQ ID NO: 14041 - DNA, 21 bp, Homo sapiens
ccaattcaagsagaaaatgtc

SEQ ID NO: 14042 - DNA, 21 bp, Homo sapiens
ccatagatccrtgaaggaaga

SEQ ID NO: 14043 - DNA, 21 bp, Homo sapiens
gatgttttcayattgaattgc

SEQ ID NO: 14044 - DNA, 21 bp, Homo sapiens
gcattctgcargtagagagca

SEQ ID NO: 14045 - DNA, 21 bp, Homo sapiens
ggcccaaacarcttcaactat

SEQ ID NO: 14046 - DNA, 21 bp, Homo sapiens
aattttttaarttggcattat

SEQ ID NO: 14047 - DNA, 21 bp, Homo sapiens
gagttttggcrgcattgcaga

SEQ ID NO: 14048 - DNA, 21 bp, Homo sapiens
gagacatgaargctaactaat

SEQ ID NO: 14049 - DNA, 21 bp, Homo sapiens
cttcagcctcyattcacattt

SEQ ID NO: 14050 - DNA, 21 bp, Homo sapiens
taataaaataygaccatggag

SEQ ID NO: 14051 - DNA, 21 bp, Homo sapiens
gttgcaaattyaaaagctgga

SEQ ID NO: 14052 - DNA, 21 bp, Homo sapiens
ggtaatgcgcrttgcgacttc

SEQ ID NO: 14053 - DNA, 21 bp, Homo sapiens
ctatatttccygctttctctc

SEQ ID NO: 14054 - DNA, 21 bp, Homo sapiens
ttacgatttcrcatgtttaca

SEQ ID NO: 14055 - DNA, 21 bp, Homo sapiens
gttctgagtasaaacatagct

SEQ ID NO: 14056 - DNA, 21 bp, Homo sapiens
gtgttgtttakttggacccat

SEQ ID NO: 14057 - DNA, 21 bp, Homo sapiens
gaggaagttaygtgaaggcac

SEQ ID NO: 14058 - DNA, 21 bp, Homo sapiens
acaaggctgarcactacacat

SEQ ID NO: 14059 - DNA, 21 bp, Homo sapiens
tagactgactrtaagcacaga

SEQ ID NO: 14060 - DNA, 21 bp, Homo sapiens
cagcatatggrtgaaaggtgg

SEQ ID NO: 14061 - DNA, 21 bp, Homo sapiens
ttaattttcargaaagctaaa

SEQ ID NO: 14062 - DNA, 21 bp, Homo sapiens
atgaaatgtarccgtctactg

SEQ ID NO: 14063 - DNA, 21 bp, Homo sapiens
gcccatttttrcaaagtcctg

SEQ ID NO: 14064 - DNA, 21 bp, Homo sapiens
tagctccactrtatccttctt

SEQ ID NO: 14065 - DNA, 21 bp, Homo sapiens
atgttactgcstgtggtgatc

SEQ ID NO: 14066 - DNA, 21 bp, Homo sapiens
gcccataaacytggtctttga

SEQ ID NO: 14067 - DNA, 21 bp, Homo sapiens
ttatagtggaraaatgtagaa

SEQ ID NO: 14068 - DNA, 21 bp, Homo sapiens
atgcggacctrgatttacaaa

SEQ ID NO: 14069 - DNA, 21 bp, Homo sapiens
ttggcattagycactgttttt

SEQ ID NO: 14070 - DNA, 21 bp, Homo sapiens
ctgaagtcatyggcccagtac

SEQ ID NO: 14071 - DNA, 21 bp, Homo sapiens
ccatactatawccatatccat

SEQ ID NO: 14072 - DNA, 21 bp, Homo sapiens
tgtgaccctayactgaaatcc

SEQ ID NO: 14073 - DNA, 21 bp, Homo sapiens
tggggcatacygctaccatag

SEQ ID NO: 14074 - DNA, 21 bp, Homo sapiens
tccatccattrtgcctgggct

SEQ ID NO: 14075 - DNA, 21 bp, Homo sapiens
tgatttttttwaaaggttgaa

SEQ ID NO: 14076 - DNA, 21 bp, Homo sapiens
ccactggttakaaatttccca

SEQ ID NO: 14077 - DNA, 21 bp, Homo sapiens
gaagtttagawatgaaggaga

SEQ ID NO: 14078 - DNA, 21 bp, Homo sapiens
tatagtaattyagaagccata

SEQ ID NO: 14079 - DNA, 21 bp, Homo sapiens
tttaaaatctktactttgatc

SEQ ID NO: 14080 - DNA, 21 bp, Homo sapiens
actatatctcrtgtgtttctt

SEQ ID NO: 14081 - DNA, 21 bp, Homo sapiens
gctatggccarctgagtcaaa

SEQ ID NO: 14082 - DNA, 21 bp, Homo sapiens
gaccattttcygtgtccacaa

SEQ ID NO: 14083 - DNA, 21 bp, Homo sapiens
tgatgaagctrctcaccaact

SEQ ID NO: 14084 - DNA, 21 bp, Homo sapiens
accttatacaycagggcaata

SEQ ID NO: 14085 - DNA, 21 bp, Homo sapiens
caggtcaactrcagattgtgg

SEQ ID NO: 14086 - DNA, 21 bp, Homo sapiens
gagaaagaatycccgaatcaa

SEQ ID NO: 14087 - DNA, 21 bp, Homo sapiens
tctgcttgtcstttacccgac

SEQ ID NO: 14088 - DNA, 21 bp, Homo sapiens
aggcataaagytgcaagatgg

SEQ ID NO: 14089 - DNA, 21 bp, Homo sapiens
ctctacttgcrggaaaattag

SEQ ID NO: 14090 - DNA, 21 bp, Homo sapiens
tttctgaatgyatctgaattg

SEQ ID NO: 14091 - DNA, 21 bp, Homo sapiens
tgtgaaattcmtctagaagta

SEQ ID NO: 14092 - DNA, 21 bp, Homo sapiens
aattgaacagkacaactgaac

SEQ ID NO: 14093 - DNA, 21 bp, Homo sapiens
tttaccaacaygtgcaaccaa

SEQ ID NO: 14094 - DNA, 21 bp, Homo sapiens
taaattagatmccataacatc

SEQ ID NO: 14095 - DNA, 21 bp, Homo sapiens
atagctagttyggatcttagc

SEQ ID NO: 14096 - DNA, 21 bp, Homo sapiens
aaaagtccatwatcattacag

SEQ ID NO: 14097 - DNA, 21 bp, Homo sapiens
gtactgaatakgtatgtctag

SEQ ID NO: 14098 - DNA, 21 bp, Homo sapiens
ctccatgttcrttttgctctt

SEQ ID NO: 14099 - DNA, 21 bp, Homo sapiens
ctagttctcamtacaaagttc

SEQ ID NO: 14100 - DNA, 21 bp, Homo sapiens
aaagcaaggtrtaaagagcta

SEQ ID NO: 14101 - DNA, 21 bp, Homo sapiens
ccatttaacamccagagagca

SEQ ID NO: 14102 - DNA, 21 bp, Homo sapiens
ttaaacttgcyttactaaagc

SEQ ID NO: 14103 - DNA, 21 bp, Homo sapiens
atgtcaagaamccagatgtag

SEQ ID NO: 14104 - DNA, 21 bp, Homo sapiens
gttcaaaagamtgaaagcagt

SEQ ID NO: 14105 - DNA, 21 bp, Homo sapiens
aacatttctcrtataaaccca

SEQ ID NO: 14106 - DNA, 21 bp, Homo sapiens
gtagttgttcwcagcctgaca

SEQ ID NO: 14107 - DNA, 21 bp, Homo sapiens
ttgactctatraattagttag

SEQ ID NO: 14108 - DNA, 21 bp, Homo sapiens
ctgcttttaayacatacagtt

SEQ ID NO: 14109 - DNA, 21 bp, Homo sapiens
tggcccagagrtatctgctac

SEQ ID NO: 14110 - DNA, 21 bp, Homo sapiens
atgagtacaayctgaatcata

SEQ ID NO: 14111 - DNA, 21 bp, Homo sapiens
ttattctctarttagtcaaag

SEQ ID NO: 14112 - DNA, 21 bp, Homo sapiens
tgctcaacaamatgtctcatt

SEQ ID NO: 14113 - DNA, 21 bp, Homo sapiens
agaatctccarcttcttagtg

SEQ ID NO: 14114 - DNA, 21 bp, Homo sapiens
acactgtacargttgtcgaga

SEQ ID NO: 14115 - DNA, 21 bp, Homo sapiens
gtttctgttayatgcctgata

SEQ ID NO: 14116 - DNA, 21 bp, Homo sapiens
ataaattacartattaaaaaa

SEQ ID NO: 14117 - DNA, 21 bp, Homo sapiens
ttccaaccaayggtgtgaaaa

SEQ ID NO: 14118 - DNA, 21 bp, Homo sapiens
taaagattttyttaaaaaggt

SEQ ID NO: 14119 - DNA, 21 bp, Homo sapiens
acagattctcrttacataaaa

SEQ ID NO: 14120 - DNA, 21 bp, Homo sapiens
tttcataggayaatctcatct

SEQ ID NO: 14121 - DNA, 21 bp, Homo sapiens
gttatgggccrcctacttcag

SEQ ID NO: 14122 - DNA, 21 bp, Homo sapiens
tcaatttatgrtggcgtaata

SEQ ID NO: 14123 - DNA, 21 bp, Homo sapiens
atgcacatttkagataaaagg

SEQ ID NO: 14124 - DNA, 21 bp, Homo sapiens
tcaagactaarggtaaatgtc

SEQ ID NO: 14125 - DNA, 21 bp, Homo sapiens
actaccacttraggtgtgtgg

SEQ ID NO: 14126 - DNA, 21 bp, Homo sapiens
gtgcaatgaaygtttatgctc

SEQ ID NO: 14127 - DNA, 21 bp, Homo sapiens
taatctaaacytaacattatg

SEQ ID NO: 14128 - DNA, 21 bp, Homo sapiens
ttcctaggtayggtccctcac

SEQ ID NO: 14129 - DNA, 21 bp, Homo sapiens
cacctctgccrtaattcgatt

SEQ ID NO: 14130 - DNA, 21 bp, Homo sapiens
aaatggattayagcagcaaaa

SEQ ID NO: 14131 - DNA, 21 bp, Homo sapiens
aatcactgtcrtcatttaaat

SEQ ID NO: 14132 - DNA, 21 bp, Homo sapiens
ttaccaaaacwgtgatgtaaa

SEQ ID NO: 14133 - DNA, 21 bp, Homo sapiens
gcttcctttartagatcttta

SEQ ID NO: 14134 - DNA, 21 bp, Homo sapiens
taaagcagatkagcagaaagc

SEQ ID NO: 14135 - DNA, 21 bp, Homo sapiens
attagagcacytaaatatttt

SEQ ID NO: 14136 - DNA, 21 bp, Homo sapiens
gtcagacaaaytactcttcac

SEQ ID NO: 14137 - DNA, 21 bp, Homo sapiens
cactctattargcaacagggt

SEQ ID NO: 14138 - DNA, 21 bp, Homo sapiens
tgtgcctcctrtgcagtgaat

SEQ ID NO: 14139 - DNA, 21 bp, Homo sapiens
aatcctacaartaaaatggag

SEQ ID NO: 14140 - DNA, 21 bp, Homo sapiens
attttagctcyatcattcaca

SEQ ID NO: 14141 - DNA, 21 bp, Homo sapiens
gtagttgtgtrgtatccaaaa

SEQ ID NO: 14142 - DNA, 21 bp, Homo sapiens
aagtaaaaatrtgtttatgaa

SEQ ID NO: 14143 - DNA, 21 bp, Homo sapiens
aaaaggcttayatagttaagg

SEQ ID NO: 14144 - DNA, 21 bp, Homo sapiens
tctgatcagtrggcatagttt

SEQ ID NO: 14145 - DNA, 21 bp, Homo sapiens
ttgctcaagarggaagataaa

SEQ ID NO: 14146 - DNA, 21 bp, Homo sapiens
gctgggcacaytgattacaca

SEQ ID NO: 14147 - DNA, 21 bp, Homo sapiens
cctaaaatcaragaaatgctc

SEQ ID NO: 14148 - DNA, 21 bp, Homo sapiens
gctgttaagasgtatgggaac

SEQ ID NO: 14149 - DNA, 21 bp, Homo sapiens
gttagaaaagyatttttggta

SEQ ID NO: 14150 - DNA, 21 bp, Homo sapiens
acaaaaattcygtgaaaaaag

SEQ ID NO: 14151 - DNA, 21 bp, Homo sapiens
tataagaaacrgtcaaaagac

SEQ ID NO: 14152 - DNA, 21 bp, Homo sapiens
agtccttaatrtgtagctaaa

SEQ ID NO: 14153 - DNA, 21 bp, Homo sapiens
cctaattttgsagttaaattg

SEQ ID NO: 14154 - DNA, 21 bp, Homo sapiens
agagccattaytgggtcctgg

SEQ ID NO: 14155 - DNA, 21 bp, Homo sapiens
actctgaaccrtaatacagaa

SEQ ID NO: 14156 - DNA, 21 bp, Homo sapiens
actcaacacaytgtcttattt

SEQ ID NO: 14157 - DNA, 21 bp, Homo sapiens
tttcatcttaragcaataatt

SEQ ID NO: 14158 - DNA, 21 bp, Homo sapiens
tggacttatcrgaaacttctt

SEQ ID NO: 14159 - DNA, 21 bp, Homo sapiens
catatttttaraaccaatact

SEQ ID NO: 14160 - DNA, 21 bp, Homo sapiens
attttataccygctgctttta

SEQ ID NO: 14161 - DNA, 21 bp, Homo sapiens
aagatcctcaycctgtgtggt

SEQ ID NO: 14162 - DNA, 21 bp, Homo sapiens
caaatggtackcaaaagcaga

SEQ ID NO: 14163 - DNA, 21 bp, Homo sapiens
acctttacackagtttgctac

SEQ ID NO: 14164 - DNA, 21 bp, Homo sapiens
ttttcagtgtyagacatttgt

SEQ ID NO: 14165 - DNA, 21 bp, Homo sapiens
cgtgttatccrtattacttta

SEQ ID NO: 14166 - DNA, 21 bp, Homo sapiens
ttttaggaaayttaactttgt

SEQ ID NO: 14167 - DNA, 21 bp, Homo sapiens
attaaactttwaaaaaaacta

SEQ ID NO: 14168 - DNA, 21 bp, Homo sapiens
ttgataatacygtgtcaaatc

SEQ ID NO: 14169 - DNA, 21 bp, Homo sapiens
agtgtgaaaakttggtttttt

SEQ ID NO: 14170 - DNA, 21 bp, Homo sapiens
atctggatccsaaaagaagta

SEQ ID NO: 14171 - DNA, 21 bp, Homo sapiens
gatataaagtrcgggtgagtg

SEQ ID NO: 14172 - DNA, 21 bp, Homo sapiens
tgagacattcygtaagtgcta

SEQ ID NO: 14173 - DNA, 21 bp, Homo sapiens
agttttctttkctgtaaccta

SEQ ID NO: 14174 - DNA, 21 bp, Homo sapiens
tattaggacakggagaaaatg

SEQ ID NO: 14175 - DNA, 21 bp, Homo sapiens
gagggtaggaktttaattttc

SEQ ID NO: 14176 - DNA, 21 bp, Homo sapiens
tccagttactktttctaagag

SEQ ID NO: 14177 - DNA, 21 bp, Homo sapiens
tcaccatacasagcacatgta

SEQ ID NO: 14178 - DNA, 21 bp, Homo sapiens
ttaaccaaccstataaaattg

SEQ ID NO: 14179 - DNA, 21 bp, Homo sapiens
attttgctgtrtggctcaaat

SEQ ID NO: 14180 - DNA, 21 bp, Homo sapiens
aagagcaattkggtacctttc

SEQ ID NO: 14181 - DNA, 21 bp, Homo sapiens
aatggagatcrtgttttactt

SEQ ID NO: 14182 - DNA, 21 bp, Homo sapiens
ttcatgacaartcagtttgcc

SEQ ID NO: 14183 - DNA, 21 bp, Homo sapiens
ataggtgactratctccccgg

SEQ ID NO: 14184 - DNA, 21 bp, Homo sapiens
ctttaataaartatgtgatta

SEQ ID NO: 14185 - DNA, 21 bp, Homo sapiens
gccaaagaaartattgttcta

SEQ ID NO: 14186 - DNA, 21 bp, Homo sapiens
aattttgtttmagtcattaca

SEQ ID NO: 14187 - DNA, 21 bp, Homo sapiens
caaatgttacygcttatcttt

SEQ ID NO: 14188 - DNA, 21 bp, Homo sapiens
aagctgtccaraaacttgttc

SEQ ID NO: 14189 - DNA, 21 bp, Homo sapiens
aattaggcaaygacccataaa

SEQ ID NO: 14190 - DNA, 21 bp, Homo sapiens
ctaagaattckggagcaggaa

SEQ ID NO: 14191 - DNA, 21 bp, Homo sapiens
tttgaggaccytgaaccaaga

SEQ ID NO: 14192 - DNA, 21 bp, Homo sapiens
cttctcagtcmtggtaacata

SEQ ID NO: 14193 - DNA, 21 bp, Homo sapiens
tttgatcaaasataggagtcc

SEQ ID NO: 14194 - DNA, 21 bp, Homo sapiens
tttggacttamcacgtgtgct

SEQ ID NO: 14195 - DNA, 21 bp, Homo sapiens
ctagaagttamatattaatgc

SEQ ID NO: 14196 - DNA, 21 bp, Homo sapiens
ttacttggcarcttacttcgt

SEQ ID NO: 14197 - DNA, 21 bp, Homo sapiens
ggaatgagtgwtgtccaccct

SEQ ID NO: 14198 - DNA, 21 bp, Homo sapiens
ttcttatgccrtataggaagc

SEQ ID NO: 14199 - DNA, 21 bp, Homo sapiens
tatgcaatttwtatcagctta

SEQ ID NO: 14200 - DNA, 21 bp, Homo sapiens
tcagatgttamtttataatgt

SEQ ID NO: 14201 - DNA, 21 bp, Homo sapiens
gcaattgaggrtccctaagga

SEQ ID NO: 14202 - DNA, 21 bp, Homo sapiens
tttcttataamagccatttca

SEQ ID NO: 14203 - DNA, 21 bp, Homo sapiens
agccccaagtytctgcagcct

SEQ ID NO: 14204 - DNA, 21 bp, Homo sapiens
tatactctttrtgaagtcata

SEQ ID NO: 14205 - DNA, 21 bp, Homo sapiens
gatctagtagmtttttagact

SEQ ID NO: 14206 - DNA, 21 bp, Homo sapiens
cctggcctttrgtgttctgta

SEQ ID NO: 14207 - DNA, 21 bp, Homo sapiens
atatttccccrtagtgtcttg

SEQ ID NO: 14208 - DNA, 21 bp, Homo sapiens
acggtaaaatrtagaagactt

SEQ ID NO: 14209 - DNA, 21 bp, Homo sapiens
ataaactgatmctccagaatt

SEQ ID NO: 14210 - DNA, 21 bp, Homo sapiens
caccttataawcattatgcag

SEQ ID NO: 14211 - DNA, 21 bp, Homo sapiens
aaagcttaaarttctacttca

SEQ ID NO: 14212 - DNA, 21 bp, Homo sapiens
atatatacgtytgacatttag

SEQ ID NO: 14213 - DNA, 21 bp, Homo sapiens
tggacctgtgycactccttcc

SEQ ID NO: 14214 - DNA, 21 bp, Homo sapiens
cccagcttccstgaccacgtc

SEQ ID NO: 14215 - DNA, 21 bp, Homo sapiens
tgcaattcctrgatttcatca

SEQ ID NO: 14216 - DNA, 21 bp, Homo sapiens
ctcctctggarcttaaatgta

SEQ ID NO: 14217 - DNA, 21 bp, Homo sapiens
tgcatattccrtatcgaactg

SEQ ID NO: 14218 - DNA, 21 bp, Homo sapiens
agagaggtacrgttctttaaa

SEQ ID NO: 14219 - DNA, 21 bp, Homo sapiens
ttggaaaaagyatgtcaatag

SEQ ID NO: 14220 - DNA, 21 bp, Homo sapiens
gaagaacagayttcagcatta

SEQ ID NO: 14221 - DNA, 21 bp, Homo sapiens
cttaccacagytattgagtag

SEQ ID NO: 14222 - DNA, 21 bp, Homo sapiens
atgtgggtgtrgctaattttt

SEQ ID NO: 14223 - DNA, 21 bp, Homo sapiens
caaattggttyaaatttttgg

SEQ ID NO: 14224 - DNA, 21 bp, Homo sapiens
agggtctgcargtatggaagg

SEQ ID NO: 14225 - DNA, 21 bp, Homo sapiens
tcaaactcttkatttctaaag

SEQ ID NO: 14226 - DNA, 21 bp, Homo sapiens
gccaaattaastacctgaaat

SEQ ID NO: 14227 - DNA, 21 bp, Homo sapiens
tattttaagcycttttgatgg

SEQ ID NO: 14228 - DNA, 21 bp, Homo sapiens
cattcctgatrgagcctaaag

SEQ ID NO: 14229 - DNA, 21 bp, Homo sapiens
tggaaaggacwtatgcagttt

SEQ ID NO: 14230 - DNA, 21 bp, Homo sapiens
ttttacatgtyggacaacact

SEQ ID NO: 14231 - DNA, 21 bp, Homo sapiens
tatctggagtytttggataat

SEQ ID NO: 14232 - DNA, 21 bp, Homo sapiens
attttctctgyttttcattct

SEQ ID NO: 14233 - DNA, 21 bp, Homo sapiens
tgagcctatcrtttttctagg

SEQ ID NO: 14234 - DNA, 21 bp, Homo sapiens
agacttttccktgtctattgt

SEQ ID NO: 14235 - DNA, 21 bp, Homo sapiens
ctaaaataatwaggttctcag

SEQ ID NO: 14236 - DNA, 21 bp, Homo sapiens
tttgcagttastttatgaatc

SEQ ID NO: 14237 - DNA, 21 bp, Homo sapiens
ctgggcaaaartaagataaca

SEQ ID NO: 14238 - DNA, 21 bp, Homo sapiens
tagctctaagstttctcctat

SEQ ID NO: 14239 - DNA, 21 bp, Homo sapiens
ttgttcaaatyttaacctgca

SEQ ID NO: 14240 - DNA, 21 bp, Homo sapiens
aatagtccaayatgctttgcc

SEQ ID NO: 14241 - DNA, 21 bp, Homo sapiens
tttactgacarttcaagtact

SEQ ID NO: 14242 - DNA, 21 bp, Homo sapiens
tagaagagaarcttgatggtg

SEQ ID NO: 14243 - DNA, 21 bp, Homo sapiens
ttatctatcakaatgttcaat

SEQ ID NO: 14244 - DNA, 21 bp, Homo sapiens
gcccataagcrttttggttgt

SEQ ID NO: 14245 - DNA, 21 bp, Homo sapiens
ccattgggaayacaaagggga

SEQ ID NO: 14246 - DNA, 21 bp, Homo sapiens
attccgtataytgtggagtct

SEQ ID NO: 14247 - DNA, 21 bp, Homo sapiens
tcactctttgraatgcctaag

SEQ ID NO: 14248 - DNA, 21 bp, Homo sapiens
aacctcaaagstagtgagaaa

SEQ ID NO: 14249 - DNA, 21 bp, Homo sapiens
acgagagaatrgaaggtcagg

SEQ ID NO: 14250 - DNA, 21 bp, Homo sapiens
ctttctggtcmccatggcaaa

SEQ ID NO: 14251 - DNA, 21 bp, Homo sapiens
tgcaatactayggaagatgca

SEQ ID NO: 14252 - DNA, 21 bp, Homo sapiens
cctgaaggagrtttgaataga

SEQ ID NO: 14253 - DNA, 21 bp, Homo sapiens
aatttgtaccrctttctagat

SEQ ID NO: 14254 - DNA, 21 bp, Homo sapiens
ttttttcctcktgtaacatta

SEQ ID NO: 14255 - DNA, 21 bp, Homo sapiens
aatttacatckttatatttct

SEQ ID NO: 14256 - DNA, 21 bp, Homo sapiens
cactctgtgcstgcatctttt

SEQ ID NO: 14257 - DNA, 21 bp, Homo sapiens
agttggagacrtagtgaacag

SEQ ID NO: 14258 - DNA, 21 bp, Homo sapiens
gcccagccgtyggtaggtaac

SEQ ID NO: 14259 - DNA, 21 bp, Homo sapiens
acagtaggtgycagaaaacat

SEQ ID NO: 14260 - DNA, 21 bp, Homo sapiens
ctttaggacayggaagtagct

SEQ ID NO: 14261 - DNA, 21 bp, Homo sapiens
gagagccatgrcatttacaac

SEQ ID NO: 14262 - DNA, 21 bp, Homo sapiens
aattcaaaaarcaccataaga

SEQ ID NO: 14263 - DNA, 21 bp, Homo sapiens
cagtgttatcycaccactcat

SEQ ID NO: 14264 - DNA, 21 bp, Homo sapiens
actatgagttwggatttaatt

SEQ ID NO: 14265 - DNA, 21 bp, Homo sapiens
tgtaagtcttsaccaatttta

SEQ ID NO: 14266 - DNA, 21 bp, Homo sapiens
aaccacccttytatatgggct

SEQ ID NO: 14267 - DNA, 21 bp, Homo sapiens
tttattggatycacctttgtc

SEQ ID NO: 14268 - DNA, 21 bp, Homo sapiens
tctaagactaygttggatatg

SEQ ID NO: 14269 - DNA, 21 bp, Homo sapiens
aagcttaaaarggcaaatttc

SEQ ID NO: 14270 - DNA, 21 bp, Homo sapiens
atttttctgakcctgctgact

SEQ ID NO: 14271 - DNA, 21 bp, Homo sapiens
ttagtcctaamaaacatccct

SEQ ID NO: 14272 - DNA, 21 bp, Homo sapiens
caagcataagytagacacatg

SEQ ID NO: 14273 - DNA, 21 bp, Homo sapiens
aaagcaagtgwtcaaaacaga

SEQ ID NO: 14274 - DNA, 21 bp, Homo sapiens
tgccaagtcamatcattggat

SEQ ID NO: 14275 - DNA, 21 bp, Homo sapiens
ataaaagtcayaaaccattac

SEQ ID NO: 14276 - DNA, 21 bp, Homo sapiens
atgacaaataraaatgatatc

SEQ ID NO: 14277 - DNA, 21 bp, Homo sapiens
tttgtaggagrtaagaatcac

SEQ ID NO: 14278 - DNA, 21 bp, Homo sapiens
agtaatgaggkcctcttcctc

SEQ ID NO: 14279 - DNA, 21 bp, Homo sapiens
caaaactcaarctctgaaagt

SEQ ID NO: 14280 - DNA, 21 bp, Homo sapiens
tttggtgcacycatatttgtt

SEQ ID NO: 14281 - DNA, 21 bp, Homo sapiens
aaaaagcatcycttcttcctt

SEQ ID NO: 14282 - DNA, 21 bp, Homo sapiens
ttcagccactmatttcccaga

SEQ ID NO: 14283 - DNA, 21 bp, Homo sapiens
tatggtcctawcaggaaactt

SEQ ID NO: 14284 - DNA, 21 bp, Homo sapiens
gcactagtctytgctcaatgt

SEQ ID NO: 14285 - DNA, 21 bp, Homo sapiens
tgagagttcaktaagctcatt

SEQ ID NO: 14286 - DNA, 21 bp, Homo sapiens
atactattcgrgtgtctgcac

SEQ ID NO: 14287 - DNA, 21 bp, Homo sapiens
agcctaggtaratgtgaagat

SEQ ID NO: 14288 - DNA, 21 bp, Homo sapiens
aacatcccaargattaaaaaa

SEQ ID NO: 14289 - DNA, 21 bp, Homo sapiens
tggaaactggmtgtggctatt

SEQ ID NO: 14290 - DNA, 21 bp, Homo sapiens
gggcatgtatrcgataccaca

SEQ ID NO: 14291 - DNA, 21 bp, Homo sapiens
cagcaattgawcttttctgtc

SEQ ID NO: 14292 - DNA, 21 bp, Homo sapiens
tttcccaagcrtgttttatct

SEQ ID NO: 14293 - DNA, 21 bp, Homo sapiens
ctgtccctgtwactagtcttg

SEQ ID NO: 14294 - DNA, 21 bp, Homo sapiens
tcaagtactaktttcagggca

SEQ ID NO: 14295 - DNA, 21 bp, Homo sapiens
ccattttaaaraggagattac

SEQ ID NO: 14296 - DNA, 21 bp, Homo sapiens
ttgaataatcrgaaagcctct

SEQ ID NO: 14297 - DNA, 21 bp, Homo sapiens
tctccattagyagaagccaag

SEQ ID NO: 14298 - DNA, 21 bp, Homo sapiens
cccactattgkctccttgaaa

SEQ ID NO: 14299 - DNA, 21 bp, Homo sapiens
atgtattcttytggagttatc

SEQ ID NO: 14300 - DNA, 21 bp, Homo sapiens
ggtactccagraaaaaaagga

SEQ ID NO: 14301 - DNA, 21 bp, Homo sapiens
tgcaaagtagwgcacatttta

SEQ ID NO: 14302 - DNA, 21 bp, Homo sapiens
acttggtggargagaaaagtg

SEQ ID NO: 14303 - DNA, 21 bp, Homo sapiens
agtctgcagargaatttgtgg

SEQ ID NO: 14304 - DNA, 21 bp, Homo sapiens
tgatggcagcrtttgagcagg

SEQ ID NO: 14305 - DNA, 21 bp, Homo sapiens
tgtgcctgctkcagggaaacg

SEQ ID NO: 14306 - DNA, 21 bp, Homo sapiens
caggaaacctsaagttgtccc

SEQ ID NO: 14307 - DNA, 21 bp, Homo sapiens
aacagtaattsttggacaagg

SEQ ID NO: 14308 - DNA, 21 bp, Homo sapiens
acttttcaggstgtacttttt

SEQ ID NO: 14309 - DNA, 21 bp, Homo sapiens
atatagataaytggtatcaat

SEQ ID NO: 14310 - DNA, 21 bp, Homo sapiens
tggtatatttygaaacccttt

SEQ ID NO: 14311 - DNA, 21 bp, Homo sapiens
gccaacatccrctaaaataaa

SEQ ID NO: 14312 - DNA, 21 bp, Homo sapiens
ggcacctatcygcaggcacct

SEQ ID NO: 14313 - DNA, 21 bp, Homo sapiens
aaagtttctcrgggcagattt

SEQ ID NO: 14314 - DNA, 21 bp, Homo sapiens
tgtaaaactgyccaactcttt

SEQ ID NO: 14315 - DNA, 21 bp, Homo sapiens
agtggcaatgsaggctgaaga

SEQ ID NO: 14316 - DNA, 21 bp, Homo sapiens
tgggggagackaaagttcctg

SEQ ID NO: 14317 - DNA, 21 bp, Homo sapiens
atcaataccartctcctctaa

SEQ ID NO: 14318 - DNA, 21 bp, Homo sapiens
ttttctcaatstctaacaaaa

SEQ ID NO: 14319 - DNA, 21 bp, Homo sapiens
agtcttctgtrtcactccctg

SEQ ID NO: 14320 - DNA, 21 bp, Homo sapiens
gtttgcacatyttgggactaa

SEQ ID NO: 14321 - DNA, 21 bp, Homo sapiens
tttatagatgygaaagtgtca

SEQ ID NO: 14322 - DNA, 21 bp, Homo sapiens
aatagctcacycagttatgca

SEQ ID NO: 14323 - DNA, 21 bp, Homo sapiens
ggcaacacctrctgagaggtt

SEQ ID NO: 14324 - DNA, 21 bp, Homo sapiens
tattaaatcarcctcactgat

SEQ ID NO: 14325 - DNA, 21 bp, Homo sapiens
ctattacttaraaagctaaat

SEQ ID NO: 14326 - DNA, 21 bp, Homo sapiens
tcagaagagarttggggttga

SEQ ID NO: 14327 - DNA, 21 bp, Homo sapiens
gatagagttasttttacatga

SEQ ID NO: 14328 - DNA, 21 bp, Homo sapiens
agatgagatgrctttccaaga

SEQ ID NO: 14329 - DNA, 21 bp, Homo sapiens
agattgatagyaatgctgaat

SEQ ID NO: 14330 - DNA, 21 bp, Homo sapiens
tatttcctgamaatgtcattt

SEQ ID NO: 14331 - DNA, 21 bp, Homo sapiens
tcaaaggcagraagtatatat

SEQ ID NO: 14332 - DNA, 21 bp, Homo sapiens
tctggaggaaytggggcttac

SEQ ID NO: 14333 - DNA, 21 bp, Homo sapiens
tggtcaaattmaatctctcca

SEQ ID NO: 14334 - DNA, 21 bp, Homo sapiens
aaataggttayaaattgtgaa

SEQ ID NO: 14335 - DNA, 21 bp, Homo sapiens
gtgatttctastacataaaca

SEQ ID NO: 14336 - DNA, 21 bp, Homo sapiens
ttttgtttgastaataatatt

SEQ ID NO: 14337 - DNA, 21 bp, Homo sapiens
tgtctaatgckctctttcgtt

SEQ ID NO: 14338 - DNA, 21 bp, Homo sapiens
ccagaaagagratttgctgtt

SEQ ID NO: 14339 - DNA, 21 bp, Homo sapiens
gtggttctggkgtctggagca

SEQ ID NO: 14340 - DNA, 21 bp, Homo sapiens
tttctctctgyagtggatatc

SEQ ID NO: 14341 - DNA, 21 bp, Homo sapiens
tctactttaargcccctcatt

SEQ ID NO: 14342 - DNA, 21 bp, Homo sapiens
gggtcagccckttggctatgc

SEQ ID NO: 14343 - DNA, 21 bp, Homo sapiens
gacaatctaamattaatttga

SEQ ID NO: 14344 - DNA, 21 bp, Homo sapiens
gcaaatcaatrtccatcccag

SEQ ID NO: 14345 - DNA, 21 bp, Homo sapiens
acaagcctatyctccttcagc

SEQ ID NO: 14346 - DNA, 21 bp, Homo sapiens
tcagatatcaygttatgacac

SEQ ID NO: 14347 - DNA, 21 bp, Homo sapiens
ggcttaaattygtataaatgt

SEQ ID NO: 14348 - DNA, 21 bp, Homo sapiens
ttgttgcaackattcttccac

SEQ ID NO: 14349 - DNA, 21 bp, Homo sapiens
tctaattattygggtaattta

SEQ ID NO: 14350 - DNA, 21 bp, Homo sapiens
gcttagtttakgtcatgaggt

SEQ ID NO: 14351 - DNA, 21 bp, Homo sapiens
aatttaaggcsctgttcctca

SEQ ID NO: 14352 - DNA, 21 bp, Homo sapiens
catgagtatartgattaaaat

SEQ ID NO: 14353 - DNA, 21 bp, Homo sapiens
acagtcaaaasgcatagtcct

SEQ ID NO: 14354 - DNA, 21 bp, Homo sapiens
gattgggaccygaactccatg

SEQ ID NO: 14355 - DNA, 21 bp, Homo sapiens
tttgttgtttkctttctgcag

SEQ ID NO: 14356 - DNA, 21 bp, Homo sapiens
gcatgcttctmcagagacttt

SEQ ID NO: 14357 - DNA, 21 bp, Homo sapiens
taagttttctrtcttgttcct

SEQ ID NO: 14358 - DNA, 21 bp, Homo sapiens
ccaaccgaacrttactgtaag

SEQ ID NO: 14359 - DNA, 21 bp, Homo sapiens
ttcaggagaargtttatacgt

SEQ ID NO: 14360 - DNA, 21 bp, Homo sapiens
ctctgtaaatsatattttaag

SEQ ID NO: 14361 - DNA, 21 bp, Homo sapiens
ctattgctgaratgatagttt

SEQ ID NO: 14362 - DNA, 21 bp, Homo sapiens
acagaagttayagctatacca

SEQ ID NO: 14363 - DNA, 21 bp, Homo sapiens
gattcttcctyctctttataa

SEQ ID NO: 14364 - DNA, 21 bp, Homo sapiens
aatctcctttwcaaaatctct

SEQ ID NO: 14365 - DNA, 21 bp, Homo sapiens
gcatataaatstatggtaaat

SEQ ID NO: 14366 - DNA, 21 bp, Homo sapiens
taatcctataktttcagaagt

SEQ ID NO: 14367 - DNA, 21 bp, Homo sapiens
catggaagacygaaaataaat

SEQ ID NO: 14368 - DNA, 21 bp, Homo sapiens
accctgaaaakacttgacttg

SEQ ID NO: 14369 - DNA, 21 bp, Homo sapiens
ttaacaatgarcattttggag

SEQ ID NO: 14370 - DNA, 21 bp, Homo sapiens
ctaaaacaaartattccagaa

SEQ ID NO: 14371 - DNA, 21 bp, Homo sapiens
aacttctttartaattctgct

SEQ ID NO: 14372 - DNA, 21 bp, Homo sapiens
tccattaatgmcataaatttc

SEQ ID NO: 14373 - DNA, 21 bp, Homo sapiens
gtgctacttgrtacccagaga

SEQ ID NO: 14374 - DNA, 21 bp, Homo sapiens
catttcatttyccccaaatta

SEQ ID NO: 14375 - DNA, 21 bp, Homo sapiens
tctgttcaccwaatatctttc

SEQ ID NO: 14376 - DNA, 21 bp, Homo sapiens
aggcataacaraagtaaagaa

SEQ ID NO: 14377 - DNA, 21 bp, Homo sapiens
ccattaggccygaacagggtg

SEQ ID NO: 14378 - DNA, 21 bp, Homo sapiens
ctccaaaaaamataagtaagc

SEQ ID NO: 14379 - DNA, 21 bp, Homo sapiens
gaactctctgygcttttgcgt

SEQ ID NO: 14380 - DNA, 21 bp, Homo sapiens
gaagtaatatyagactcctgc

SEQ ID NO: 14381 - DNA, 21 bp, Homo sapiens
ggttttagaamacattgtagc

SEQ ID NO: 14382 - DNA, 21 bp, Homo sapiens
tgttacttaawagctctgtaa

SEQ ID NO: 14383 - DNA, 21 bp, Homo sapiens
acaaagtaaamcatcagaaaa

SEQ ID NO: 14384 - DNA, 21 bp, Homo sapiens
ataaagctatyatcgtggaaa

SEQ ID NO: 14385 - DNA, 21 bp, Homo sapiens
ttgaatacatyaaatatcctt

SEQ ID NO: 14386 - DNA, 21 bp, Homo sapiens
gcactgttggrcaagttacct

SEQ ID NO: 14387 - DNA, 21 bp, Homo sapiens
tggcagcagaracatgctcaa

SEQ ID NO: 14388 - DNA, 21 bp, Homo sapiens
ttgtaggataytgggtgacaa

SEQ ID NO: 14389 - DNA, 21 bp, Homo sapiens
agcgaaaagawgcattctgtg

SEQ ID NO: 14390 - DNA, 21 bp, Homo sapiens
ttttgaaaaasgaataaaata

SEQ ID NO: 14391 - DNA, 21 bp, Homo sapiens
gggaaaaaaartccattaaaa

SEQ ID NO: 14392 - DNA, 21 bp, Homo sapiens
tggcgtgaagktacctacata

SEQ ID NO: 14393 - DNA, 21 bp, Homo sapiens
aaggaaacatrgatgcttcaa

SEQ ID NO: 14394 - DNA, 21 bp, Homo sapiens
cttaggcagcsaagagcccta

SEQ ID NO: 14395 - DNA, 21 bp, Homo sapiens
gggtgcctctrttcctatttc

SEQ ID NO: 14396 - DNA, 21 bp, Homo sapiens
caaagacgacstttcttccac

SEQ ID NO: 14397 - DNA, 21 bp, Homo sapiens
acaaaggaaakacaactagaa

SEQ ID NO: 14398 - DNA, 21 bp, Homo sapiens
gttacagatayaagaaagcat

SEQ ID NO: 14399 - DNA, 21 bp, Homo sapiens
tgcttatattrcgtgtgggta

SEQ ID NO: 14400 - DNA, 21 bp, Homo sapiens
atgaacaagayaggagttata

SEQ ID NO: 14401 - DNA, 21 bp, Homo sapiens
agacaaaccaygtgggcctct

SEQ ID NO: 14402 - DNA, 21 bp, Homo sapiens
tacttcattaytgatgtctgg

SEQ ID NO: 14403 - DNA, 21 bp, Homo sapiens
aattaacataygtcctataaa

SEQ ID NO: 14404 - DNA, 21 bp, Homo sapiens
catttgctttycataaaaatt

SEQ ID NO: 14405 - DNA, 21 bp, Homo sapiens
acattattttytaaaagtcat

SEQ ID NO: 14406 - DNA, 21 bp, Homo sapiens
tgttttatgtygcttctggat

SEQ ID NO: 14407 - DNA, 21 bp, Homo sapiens
ataatttcatmcttttaatgc

SEQ ID NO: 14408 - DNA, 21 bp, Homo sapiens
atggctcctgmccacttgtgc

SEQ ID NO: 14409 - DNA, 21 bp, Homo sapiens
gataaatgctycctctttata

SEQ ID NO: 14410 - DNA, 21 bp, Homo sapiens
agatgcagcasgtattcaaca

SEQ ID NO: 14411 - DNA, 21 bp, Homo sapiens
ctgcacattaygatttttttt

SEQ ID NO: 14412 - DNA, 21 bp, Homo sapiens
taatggtatcrggaggtgcta

SEQ ID NO: 14413 - DNA, 21 bp, Homo sapiens
acttggtttayatgtacaaga

SEQ ID NO: 14414 - DNA, 21 bp, Homo sapiens
ctggtaaatasttttgcgtat

SEQ ID NO: 14415 - DNA, 21 bp, Homo sapiens
ggtgagttacmcaaagataag

SEQ ID NO: 14416 - DNA, 21 bp, Homo sapiens
cataatactgytccttggatg

SEQ ID NO: 14417 - DNA, 21 bp, Homo sapiens
ttcaaatgaayatgcacaagg

SEQ ID NO: 14418 - DNA, 21 bp, Homo sapiens
tttactttaaraacaccagac

SEQ ID NO: 14419 - DNA, 21 bp, Homo sapiens
tctttggaaartcagtgaaga

SEQ ID NO: 14420 - DNA, 21 bp, Homo sapiens
tctttttcackctaggaaaat

SEQ ID NO: 14421 - DNA, 21 bp, Homo sapiens
gtggactatastcaatgatca

SEQ ID NO: 14422 - DNA, 21 bp, Homo sapiens
tatgatgtagycaataacttt

SEQ ID NO: 14423 - DNA, 21 bp, Homo sapiens
tattatcatcygggaaattag

SEQ ID NO: 14424 - DNA, 21 bp, Homo sapiens
cagtctaaaaycctcactctt

SEQ ID NO: 14425 - DNA, 21 bp, Homo sapiens
cacaaagatgktgaatgccat

SEQ ID NO: 14426 - DNA, 21 bp, Homo sapiens
ctgctatatgmcaaatcaaga

SEQ ID NO: 14427 - DNA, 21 bp, Homo sapiens
ttccatttctyttgacagata

SEQ ID NO: 14428 - DNA, 21 bp, Homo sapiens
ttgttgaatarttcttatctt

SEQ ID NO: 14429 - DNA, 21 bp, Homo sapiens
caacaaaaggrtacaaaaatg

SEQ ID NO: 14430 - DNA, 21 bp, Homo sapiens
tcacagccaakagtcaaatat

SEQ ID NO: 14431 - DNA, 21 bp, Homo sapiens
gacatttgtaraagaataagc

SEQ ID NO: 14432 - DNA, 21 bp, Homo sapiens
gacacgccagscagtctgact

SEQ ID NO: 14433 - DNA, 21 bp, Homo sapiens
cattccccaasctcaggtcac

SEQ ID NO: 14434 - DNA, 21 bp, Homo sapiens
ggggtgtcctygacactgtct

SEQ ID NO: 14435 - DNA, 21 bp, Homo sapiens
aacccgttggkgggggggtct

SEQ ID NO: 14436 - DNA, 21 bp, Homo sapiens
ttgggatgggwaggagagagg

SEQ ID NO: 14437 - DNA, 21 bp, Homo sapiens
ttttttagtgrtggaactctt

SEQ ID NO: 14438 - DNA, 21 bp, Homo sapiens
gttcccagatscccccccagg

SEQ ID NO: 14439 - DNA, 21 bp, Homo sapiens
ttagttttctrtccattaacc

SEQ ID NO: 14440 - DNA, 21 bp, Homo sapiens
actccctcttyggtccagcga

SEQ ID NO: 14441 - DNA, 21 bp, Homo sapiens
tcttctgcctytgtgtgtcag

SEQ ID NO: 14442 - DNA, 21 bp, Homo sapiens
gttagggattrcagcaaaagg

SEQ ID NO: 14443 - DNA, 21 bp, Homo sapiens
ggttgaaaacyctggcgtcat

SEQ ID NO: 14444 - DNA, 21 bp, Homo sapiens
aatagaaatawtcattagagg

SEQ ID NO: 14445 - DNA, 21 bp, Homo sapiens
ctgagatggakaaacatctgt

SEQ ID NO: 14446 - DNA, 21 bp, Homo sapiens
ttatcttcacwcctgctgccg

SEQ ID NO: 14447 - DNA, 21 bp, Homo sapiens
gtatctagaawtgaactgctc

SEQ ID NO: 14448 - DNA, 21 bp, Homo sapiens
ttgcagtgtcrtccctccacc

SEQ ID NO: 14449 - DNA, 21 bp, Homo sapiens
gtttgggatayagttttccta

SEQ ID NO: 14450 - DNA, 21 bp, Homo sapiens
caggtaacttrtggattggaa

SEQ ID NO: 14451 - DNA, 21 bp, Homo sapiens
atctcttctcscatgatctgc

SEQ ID NO: 14452 - DNA, 21 bp, Homo sapiens
ttcatattctrtaacaggcat

SEQ ID NO: 14453 - DNA, 21 bp, Homo sapiens
aggaggctcartgttagtgga

SEQ ID NO: 14454 - DNA, 21 bp, Homo sapiens
atgacaaatgktttcttttcg

SEQ ID NO: 14455 - DNA, 21 bp, Homo sapiens
tatatcacttyacaatgcaga

SEQ ID NO: 14456 - DNA, 21 bp, Homo sapiens
ttcagtgcccrtcacagtggc

SEQ ID NO: 14457 - DNA, 21 bp, Homo sapiens
actccaacttstttttaacca

SEQ ID NO: 14458 - DNA, 21 bp, Homo sapiens
aagggaaaaaygtgaatttag

SEQ ID NO: 14459 - DNA, 21 bp, Homo sapiens
tgtaggctaawggtggagctt

SEQ ID NO: 14460 - DNA, 21 bp, Homo sapiens
ttaattttcartgggcgtctg

SEQ ID NO: 14461 - DNA, 21 bp, Homo sapiens
aaatgcaatcrcgaaaggagg

SEQ ID NO: 14462 - DNA, 21 bp, Homo sapiens
gcacaagtcaratgtcggcga

SEQ ID NO: 14463 - DNA, 21 bp, Homo sapiens
ttctcaatatyccttttggca

SEQ ID NO: 14464 - DNA, 21 bp, Homo sapiens
gtgtgacgttytcaccttgaa

SEQ ID NO: 14465 - DNA, 21 bp, Homo sapiens
tggggcggcgyggggaagaat

SEQ ID NO: 14466 - DNA, 21 bp, Homo sapiens
aggccatcttkagccggtgag

SEQ ID NO: 14467 - DNA, 21 bp, Homo sapiens
ctctccctacrttccaaaggc

SEQ ID NO: 14468 - DNA, 21 bp, Homo sapiens
gtcactgagcrcaaggtgcat

SEQ ID NO: 14469 - DNA, 21 bp, Homo sapiens
aacatctaagkttaaggttga

SEQ ID NO: 14470 - DNA, 21 bp, Homo sapiens
aggagcaaccwgcaccaacag

SEQ ID NO: 14471 - DNA, 21 bp, Homo sapiens
cttcccattcytctttctaaa

SEQ ID NO: 14472 - DNA, 21 bp, Homo sapiens
ttccgatccayaggaagaaga

SEQ ID NO: 14473 - DNA, 21 bp, Homo sapiens
gattttgacaygtcctctgac

SEQ ID NO: 14474 - DNA, 21 bp, Homo sapiens
gatcacttaargtgggcaaga

SEQ ID NO: 14475 - DNA, 21 bp, Homo sapiens
gggctctggaygtaccaaagt

SEQ ID NO: 14476 - DNA, 21 bp, Homo sapiens
gggccttgtcygtacctagct

SEQ ID NO: 14477 - DNA, 21 bp, Homo sapiens
cccatcatgarcgatggattc

SEQ ID NO: 14478 - DNA, 21 bp, Homo sapiens
atgtacatagrtcatcagcaa

SEQ ID NO: 14479 - DNA, 21 bp, Homo sapiens
ggttactcatycccggaaaca

SEQ ID NO: 14480 - DNA, 21 bp, Homo sapiens
gaagggaaatrtgccaaggtg

SEQ ID NO: 14481 - DNA, 21 bp, Homo sapiens
ttatctcatckttttgtaagc

SEQ ID NO: 14482 - DNA, 21 bp, Homo sapiens
ctaatatttcygcacaataat

SEQ ID NO: 14483 - DNA, 21 bp, Homo sapiens
cctctccaggkatctaaaatt

SEQ ID NO: 14484 - DNA, 21 bp, Homo sapiens
acagcagtttrtaagtttata

SEQ ID NO: 14485 - DNA, 21 bp, Homo sapiens
tagtttagacycttatgacta

SEQ ID NO: 14486 - DNA, 21 bp, Homo sapiens
gaaagcatggkcatctccact

SEQ ID NO: 14487 - DNA, 21 bp, Homo sapiens
tcctaagagtrttttaaaatg

SEQ ID NO: 14488 - DNA, 21 bp, Homo sapiens
cctagcaatakgataaagtac

SEQ ID NO: 14489 - DNA, 21 bp, Homo sapiens
tgaatcaaagyagaaggatta

SEQ ID NO: 14490 - DNA, 21 bp, Homo sapiens
gcaacataaakaaataaatac

SEQ ID NO: 14491 - DNA, 21 bp, Homo sapiens
tacaaatagtwtactaaaaat

SEQ ID NO: 14492 - DNA, 21 bp, Homo sapiens
tatagcaccaygagcgtgttt

SEQ ID NO: 14493 - DNA, 21 bp, Homo sapiens
tggaaccatgkgagtgaggag

SEQ ID NO: 14494 - DNA, 21 bp, Homo sapiens
gaacttggaayggaggatgca

SEQ ID NO: 14495 - DNA, 21 bp, Homo sapiens
gttctgaaacygactcaacta

SEQ ID NO: 14496 - DNA, 21 bp, Homo sapiens
ccgggaccatrcaagcaggta

SEQ ID NO: 14497 - DNA, 21 bp, Homo sapiens
aagcatcccaktaatcctttt

SEQ ID NO: 14498 - DNA, 21 bp, Homo sapiens
agaataatcarggacttggct

SEQ ID NO: 14499 - DNA, 21 bp, Homo sapiens
gaggctcccakgttggcagct

SEQ ID NO: 14500 - DNA, 21 bp, Homo sapiens
accacttgctyatgaaactca

SEQ ID NO: 14501 - DNA, 21 bp, Homo sapiens
atgcagtggcrgagcaagacg

SEQ ID NO: 14502 - DNA, 21 bp, Homo sapiens
gtaaataatcygcagagcttg

SEQ ID NO: 14503 - DNA, 21 bp, Homo sapiens
cagcagagcamggattttttc

SEQ ID NO: 14504 - DNA, 21 bp, Homo sapiens
atacccttacrtcaatatagc

SEQ ID NO: 14505 - DNA, 21 bp, Homo sapiens
tcacaaattcrtgccagtggt

SEQ ID NO: 14506 - DNA, 21 bp, Homo sapiens
ttacctaaatyggaaaataaa

SEQ ID NO: 14507 - DNA, 21 bp, Homo sapiens
agagctcttayacaacacttg

SEQ ID NO: 14508 - DNA, 21 bp, Homo sapiens
ttagacaagtycctttcccac

SEQ ID NO: 14509 - DNA, 21 bp, Homo sapiens
aaatgcacagwttccgtgctg

SEQ ID NO: 14510 - DNA, 21 bp, Homo sapiens
ctatttcccaracattccaac

SEQ ID NO: 14511 - DNA, 21 bp, Homo sapiens
ggtggttagaygtgaggtcag

SEQ ID NO: 14512 - DNA, 21 bp, Homo sapiens
agacctaagaktcaccccagg

SEQ ID NO: 14513 - DNA, 21 bp, Homo sapiens
attaaaaaaawttcaagcgaa

SEQ ID NO: 14514 - DNA, 21 bp, Homo sapiens
ggattactgaytatcaaacta

SEQ ID NO: 14515 - DNA, 21 bp, Homo sapiens
tatttctgcargctatcacag

SEQ ID NO: 14516 - DNA, 21 bp, Homo sapiens
caaatacattwagtggtagtc

SEQ ID NO: 14517 - DNA, 21 bp, Homo sapiens
aaatgtagcamatcagaagcc

SEQ ID NO: 14518 - DNA, 21 bp, Homo sapiens
aatttttcttsctaaattcat

SEQ ID NO: 14519 - DNA, 21 bp, Homo sapiens
acctcaaggckttgcttacaa

SEQ ID NO: 14520 - DNA, 21 bp, Homo sapiens
actattctacrctctatagaa

SEQ ID NO: 14521 - DNA, 21 bp, Homo sapiens
tcgtccttaaygagtttgact

SEQ ID NO: 14522 - DNA, 21 bp, Homo sapiens
gaagggaaatmcaaccttgca

SEQ ID NO: 14523 - DNA, 21 bp, Homo sapiens
atttagctctkattatgtcta

SEQ ID NO: 14524 - DNA, 21 bp, Homo sapiens
atattcacatktcagaagccc

SEQ ID NO: 14525 - DNA, 21 bp, Homo sapiens
ttacaattggyttttttggct

SEQ ID NO: 14526 - DNA, 21 bp, Homo sapiens
tcttacttttygcatgctatt

SEQ ID NO: 14527 - DNA, 21 bp, Homo sapiens
tataacaaacmttgatcgaat

SEQ ID NO: 14528 - DNA, 21 bp, Homo sapiens
tcatgaaaaayggagcatgct

SEQ ID NO: 14529 - DNA, 21 bp, Homo sapiens
aagcatgaatkttggcagctt

SEQ ID NO: 14530 - DNA, 21 bp, Homo sapiens
gcaaggttaayagtcaaaatt

SEQ ID NO: 14531 - DNA, 21 bp, Homo sapiens
cacattaactsggtaaattca

SEQ ID NO: 14532 - DNA, 21 bp, Homo sapiens
cacatcccttrtactttgata

SEQ ID NO: 14533 - DNA, 21 bp, Homo sapiens
aatttaattcratagcagcat

SEQ ID NO: 14534 - DNA, 21 bp, Homo sapiens
aagaaatctartttaacaaag

SEQ ID NO: 14535 - DNA, 21 bp, Homo sapiens
agttaagatamgttgatgaag

SEQ ID NO: 14536 - DNA, 21 bp, Homo sapiens
ctaattcttaraaggactgga

SEQ ID NO: 14537 - DNA, 21 bp, Homo sapiens
tgggctgatgytcctttcttg

SEQ ID NO: 14538 - DNA, 21 bp, Homo sapiens
gcagcccgatrttgtcagcta

SEQ ID NO: 14539 - DNA, 21 bp, Homo sapiens
tgtttcagacygaacttcctc

SEQ ID NO: 14540 - DNA, 21 bp, Homo sapiens
aatgttttgtmatatccttaa

SEQ ID NO: 14541 - DNA, 21 bp, Homo sapiens
cctacctacamtgacagtata

SEQ ID NO: 14542 - DNA, 21 bp, Homo sapiens
taaactgttakgaagatggaa

SEQ ID NO: 14543 - DNA, 21 bp, Homo sapiens
ttaatttctgstgtctaggtg

SEQ ID NO: 14544 - DNA, 21 bp, Homo sapiens
agaaggtggckggaataagta

SEQ ID NO: 14545 - DNA, 21 bp, Homo sapiens
gcaaaaatgtmccctgttgac

SEQ ID NO: 14546 - DNA, 21 bp, Homo sapiens
gggagatgccyatattgtctg

SEQ ID NO: 14547 - DNA, 21 bp, Homo sapiens
aacatggcacygctccttgct

SEQ ID NO: 14548 - DNA, 21 bp, Homo sapiens
aaagtggtgcraggatatttg

SEQ ID NO: 14549 - DNA, 21 bp, Homo sapiens
ttttggaaggrcacaccaaga

SEQ ID NO: 14550 - DNA, 21 bp, Homo sapiens
agatcagtcarttaactctgg

SEQ ID NO: 14551 - DNA, 21 bp, Homo sapiens
ccctgaacctkgactatgcta

SEQ ID NO: 14552 - DNA, 21 bp, Homo sapiens
atggaattttkcaggctgtgt

SEQ ID NO: 14553 - DNA, 21 bp, Homo sapiens
ttatatgggcrttttgaaaat

SEQ ID NO: 14554 - DNA, 21 bp, Homo sapiens
agtatgagttycgacatgata

SEQ ID NO: 14555 - DNA, 21 bp, Homo sapiens
gaaggggcacrtctgacaatg

SEQ ID NO: 14556 - DNA, 21 bp, Homo sapiens
tcagtgggtgygaatggctca

SEQ ID NO: 14557 - DNA, 21 bp, Homo sapiens
cattagcactygctgaggtaa

SEQ ID NO: 14558 - DNA, 21 bp, Homo sapiens
aatatttgtcragggctaaga

SEQ ID NO: 14559 - DNA, 21 bp, Homo sapiens
ctgcactttcytatgaaaacc

SEQ ID NO: 14560 - DNA, 21 bp, Homo sapiens
acttaaaagaytgggacctta

SEQ ID NO: 14561 - DNA, 21 bp, Homo sapiens
ctacaggctgrtgacccaagg

SEQ ID NO: 14562 - DNA, 21 bp, Homo sapiens
taaacctctcygttacccgat

SEQ ID NO: 14563 - DNA, 21 bp, Homo sapiens
gtgatcacttsaaggttcttg

SEQ ID NO: 14564 - DNA, 21 bp, Homo sapiens
catttgttccygagttcacag

SEQ ID NO: 14565 - DNA, 21 bp, Homo sapiens
tctctgcgtcrtttagaatgt

SEQ ID NO: 14566 - DNA, 21 bp, Homo sapiens
tggagttactsactggcagaa

SEQ ID NO: 14567 - DNA, 21 bp, Homo sapiens
gttctccttayacgtttttgt

SEQ ID NO: 14568 - DNA, 21 bp, Homo sapiens
ccgagaccctraaggaaatcg

SEQ ID NO: 14569 - DNA, 21 bp, Homo sapiens
ataattttatraactctctta

SEQ ID NO: 14570 - DNA, 21 bp, Homo sapiens
cacaagagtcrctactgatac

SEQ ID NO: 14571 - DNA, 21 bp, Homo sapiens
cgttgcccaaytttcttgaga

SEQ ID NO: 14572 - DNA, 21 bp, Homo sapiens
gcccaagaacyggccggctag

SEQ ID NO: 14573 - DNA, 21 bp, Homo sapiens
acgggctcgcyggcagccata

SEQ ID NO: 14574 - DNA, 21 bp, Homo sapiens
taaagtttctrtggaaaaaca

SEQ ID NO: 14575 - DNA, 21 bp, Homo sapiens
aattctggttracaaagtgac

SEQ ID NO: 14576 - DNA, 21 bp, Homo sapiens
caacaccaacrtgagttcaat

SEQ ID NO: 14577 - DNA, 21 bp, Homo sapiens
aaattaagaaygctggatgta

SEQ ID NO: 14578 - DNA, 21 bp, Homo sapiens
ttgtaagccaygatgattttg

SEQ ID NO: 14579 - DNA, 21 bp, Homo sapiens
acatacatttyggtgtatttt

SEQ ID NO: 14580 - DNA, 21 bp, Homo sapiens
aaaagaacagwaagtagctta

SEQ ID NO: 14581 - DNA, 21 bp, Homo sapiens
tttgacagaaygaaggtgata

SEQ ID NO: 14582 - DNA, 21 bp, Homo sapiens
gagaacaattktaaatacacc

SEQ ID NO: 14583 - DNA, 21 bp, Homo sapiens
tcattctgacwcatctggggc

SEQ ID NO: 14584 - DNA, 21 bp, Homo sapiens
gttaaagagcmctgtgaaatt

SEQ ID NO: 14585 - DNA, 21 bp, Homo sapiens
attaatatgtyccttcagaga

SEQ ID NO: 14586 - DNA, 21 bp, Homo sapiens
ataaatccagrgaaaataaaa

SEQ ID NO: 14587 - DNA, 21 bp, Homo sapiens
tcaaattttaygttatgtttc

SEQ ID NO: 14588 - DNA, 21 bp, Homo sapiens
gccattgtaarcttctagaat

SEQ ID NO: 14589 - DNA, 21 bp, Homo sapiens
tttggctgtgwgagaaataaa

SEQ ID NO: 14590 - DNA, 21 bp, Homo sapiens
gaacattctgkgaacatattc

SEQ ID NO: 14591 - DNA, 21 bp, Homo sapiens
ttgcctgatakggcctatgcc

SEQ ID NO: 14592 - DNA, 21 bp, Homo sapiens
aagtaccaagrtaattgaaca

SEQ ID NO: 14593 - DNA, 21 bp, Homo sapiens
aagttttagtyccctgcagca

SEQ ID NO: 14594 - DNA, 21 bp, Homo sapiens
tagcatggaartgatagtcac

SEQ ID NO: 14595 - DNA, 21 bp, Homo sapiens
tatcactgctktcatttcttt

SEQ ID NO: 14596 - DNA, 21 bp, Homo sapiens
cctaatatttmccccacaaga

SEQ ID NO: 14597 - DNA, 21 bp, Homo sapiens
tcattccctawcatatcccag

SEQ ID NO: 14598 - DNA, 21 bp, Homo sapiens
tatatatattkgaaagtcacc

SEQ ID NO: 14599 - DNA, 21 bp, Homo sapiens
taatagcactrtaacttttat

SEQ ID NO: 14600 - DNA, 21 bp, Homo sapiens
agatatgtacrtttttcaatg

SEQ ID NO: 14601 - DNA, 21 bp, Homo sapiens
cgattctctayagtgtttagc

SEQ ID NO: 14602 - DNA, 21 bp, Homo sapiens
tggggtttacyactgaagcat

SEQ ID NO: 14603 - DNA, 21 bp, Homo sapiens
ttaattagcayatcatgttac

SEQ ID NO: 14604 - DNA, 21 bp, Homo sapiens
acctctattaygttacaccct

SEQ ID NO: 14605 - DNA, 21 bp, Homo sapiens
gtggtaagtgmagttttattc

SEQ ID NO: 14606 - DNA, 21 bp, Homo sapiens
ttactattttwaaaaatctat

SEQ ID NO: 14607 - DNA, 21 bp, Homo sapiens
gattcatctcrttttaaatgt

SEQ ID NO: 14608 - DNA, 21 bp, Homo sapiens
gaatacttacrattttagaaa

SEQ ID NO: 14609 - DNA, 21 bp, Homo sapiens
cttccttgtayttgtaatata

SEQ ID NO: 14610 - DNA, 21 bp, Homo sapiens
taagtaaaatmatcaattagc

SEQ ID NO: 14611 - DNA, 21 bp, Homo sapiens
tttatgccagrgaatggatta

SEQ ID NO: 14612 - DNA, 21 bp, Homo sapiens
tgaaaataatygttaaacttc

SEQ ID NO: 14613 - DNA, 21 bp, Homo sapiens
taaaaaatgtmgcaaactaat

SEQ ID NO: 14614 - DNA, 21 bp, Homo sapiens
taagtgatgayttctgaagag

SEQ ID NO: 14615 - DNA, 21 bp, Homo sapiens
aatacaacttkatctattagc

SEQ ID NO: 14616 - DNA, 21 bp, Homo sapiens
tgtaagttatrttaatggatc

SEQ ID NO: 14617 - DNA, 21 bp, Homo sapiens
tattctctctmaaattctggc

SEQ ID NO: 14618 - DNA, 21 bp, Homo sapiens
taaacaggggrtggagcagac

SEQ ID NO: 14619 - DNA, 21 bp, Homo sapiens
ctatgattaaygaggcatcac

SEQ ID NO: 14620 - DNA, 21 bp, Homo sapiens
ttttatattcraagctcaaaa

SEQ ID NO: 14621 - DNA, 21 bp, Homo sapiens
tttcagcttcygtacctaagt

SEQ ID NO: 14622 - DNA, 21 bp, Homo sapiens
tcacctaactktattcttttt

SEQ ID NO: 14623 - DNA, 21 bp, Homo sapiens
tctactggtasatcagggaaa

SEQ ID NO: 14624 - DNA, 21 bp, Homo sapiens
cactatgtccrtgacgaggaa

SEQ ID NO: 14625 - DNA, 21 bp, Homo sapiens
ccttttttgartagactctaa

SEQ ID NO: 14626 - DNA, 21 bp, Homo sapiens
ctgctttgacrcaattggtgt

SEQ ID NO: 14627 - DNA, 21 bp, Homo sapiens
catagttttakttcagaatac

SEQ ID NO: 14628 - DNA, 21 bp, Homo sapiens
gtcaccacaasattggctgga

SEQ ID NO: 14629 - DNA, 21 bp, Homo sapiens
atgccacacaytttgcttgcc

SEQ ID NO: 14630 - DNA, 21 bp, Homo sapiens
acaagtagtcmatgaaagaaa

SEQ ID NO: 14631 - DNA, 21 bp, Homo sapiens
atttttggttktgctataaac

SEQ ID NO: 14632 - DNA, 21 bp, Homo sapiens
acgtttgaagwtagaagatgg

SEQ ID NO: 14633 - DNA, 21 bp, Homo sapiens
gtgatcactargagtaacagt

SEQ ID NO: 14634 - DNA, 21 bp, Homo sapiens
ggcaaaaatawcaaatcaatg

SEQ ID NO: 14635 - DNA, 21 bp, Homo sapiens
tcacatctatyctttcacata

SEQ ID NO: 14636 - DNA, 21 bp, Homo sapiens
tatcaattttrcgtcacaggg

SEQ ID NO: 14637 - DNA, 21 bp, Homo sapiens
ttcctctcacrtacctccaat

SEQ ID NO: 14638 - DNA, 21 bp, Homo sapiens
gaatgttcaartgaaattaac

SEQ ID NO: 14639 - DNA, 21 bp, Homo sapiens
gagagttgacrtccgtatgtc

SEQ ID NO: 14640 - DNA, 21 bp, Homo sapiens
acttttgtatwgcaatgggca

SEQ ID NO: 14641 - DNA, 21 bp, Homo sapiens
ttctctcctgwgctgcgagct

SEQ ID NO: 14642 - DNA, 21 bp, Homo sapiens
gtttgaaagartatcagcatt

SEQ ID NO: 14643 - DNA, 21 bp, Homo sapiens
ccacttctcckgagcttgaat

SEQ ID NO: 14644 - DNA, 21 bp, Homo sapiens
tgttgagagaragcaaatcac

SEQ ID NO: 14645 - DNA, 21 bp, Homo sapiens
agaagtaaaawatcctttaat

SEQ ID NO: 14646 - DNA, 21 bp, Homo sapiens
tactccacacrtcctctacgc

SEQ ID NO: 14647 - DNA, 21 bp, Homo sapiens
tggcactgtakctgataaatt

SEQ ID NO: 14648 - DNA, 21 bp, Homo sapiens
aataggcttartatgacctta

SEQ ID NO: 14649 - DNA, 21 bp, Homo sapiens
gcttatatcarcccaagagtt

SEQ ID NO: 14650 - DNA, 21 bp, Homo sapiens
gtagataaagyggacattcat

SEQ ID NO: 14651 - DNA, 21 bp, Homo sapiens
tgaaaattcartctgggacaa

SEQ ID NO: 14652 - DNA, 21 bp, Homo sapiens
tgttggtaaakatcttctcct

SEQ ID NO: 14653 - DNA, 21 bp, Homo sapiens
actatctcatycaatctactg

SEQ ID NO: 14654 - DNA, 21 bp, Homo sapiens
aaataaaaatwggaaaaaata

SEQ ID NO: 14655 - DNA, 21 bp, Homo sapiens
tcataaatgtrtctattcctt

SEQ ID NO: 14656 - DNA, 21 bp, Homo sapiens
ttctgaaagcytatttatttc

SEQ ID NO: 14657 - DNA, 21 bp, Homo sapiens
ttcttactccycttaagttat

SEQ ID NO: 14658 - DNA, 21 bp, Homo sapiens
atttgagaaayttttgaatag

SEQ ID NO: 14659 - DNA, 21 bp, Homo sapiens
cccagtggcgrgcccagctgt

SEQ ID NO: 14660 - DNA, 21 bp, Homo sapiens
tccattttttwaaaaatttct

SEQ ID NO: 14661 - DNA, 21 bp, Homo sapiens
ctcatggcttrtgctcagcct

SEQ ID NO: 14662 - DNA, 21 bp, Homo sapiens
ttgcatggaayacttgcagag

SEQ ID NO: 14663 - DNA, 21 bp, Homo sapiens
agtggtttacyctaggtcccc

SEQ ID NO: 14664 - DNA, 21 bp, Homo sapiens
ttaaagggtawtagaccacaa

SEQ ID NO: 14665 - DNA, 21 bp, Homo sapiens
tatacctaaaytgggtagaag

SEQ ID NO: 14666 - DNA, 21 bp, Homo sapiens
aagaagtgacmcaaagctagc

SEQ ID NO: 14667 - DNA, 21 bp, Homo sapiens
attggtgctaygacagtaatt

SEQ ID NO: 14668 - DNA, 21 bp, Homo sapiens
aaacattttgytgttgttcta

SEQ ID NO: 14669 - DNA, 21 bp, Homo sapiens
tttatgccttkaaattgttat

SEQ ID NO: 14670 - DNA, 21 bp, Homo sapiens
ataacctccarcaactataaa

SEQ ID NO: 14671 - DNA, 21 bp, Homo sapiens
catgtgtgaaygccttcttca

SEQ ID NO: 14672 - DNA, 21 bp, Homo sapiens
aatttttttgkgtgtattttt

SEQ ID NO: 14673 - DNA, 21 bp, Homo sapiens
aaatctgcttstatttttaga

SEQ ID NO: 14674 - DNA, 21 bp, Homo sapiens
agcaaagctcragtgaaagag

SEQ ID NO: 14675 - DNA, 21 bp, Homo sapiens
taacagagaarggcatttgca

SEQ ID NO: 14676 - DNA, 21 bp, Homo sapiens
aatcctgtgaygtacaacaat

SEQ ID NO: 14677 - DNA, 21 bp, Homo sapiens
catagtggcakttctggttaa

SEQ ID NO: 14678 - DNA, 21 bp, Homo sapiens
aaaagacagcraggaaaattc

SEQ ID NO: 14679 - DNA, 21 bp, Homo sapiens
tttccaacatkggattttagc

SEQ ID NO: 14680 - DNA, 21 bp, Homo sapiens
tgaaattcaargtagtccagt

SEQ ID NO: 14681 - DNA, 21 bp, Homo sapiens
gccaaaacctytaatattttg

SEQ ID NO: 14682 - DNA, 21 bp, Homo sapiens
actttgagctrgaagccatat

SEQ ID NO: 14683 - DNA, 21 bp, Homo sapiens
ctcaaattatyggcatgacct

SEQ ID NO: 14684 - DNA, 21 bp, Homo sapiens
aggtcactatyctctttattc

SEQ ID NO: 14685 - DNA, 21 bp, Homo sapiens
gatttaatgcwgcaagagtca

SEQ ID NO: 14686 - DNA, 21 bp, Homo sapiens
aattgaatacytgttacctta

SEQ ID NO: 14687 - DNA, 21 bp, Homo sapiens
aaccaacatcygtcttccctg

SEQ ID NO: 14688 - DNA, 21 bp, Homo sapiens
gagaattgtcmgtgacccaaa

SEQ ID NO: 14689 - DNA, 21 bp, Homo sapiens
tttcaaacttygaaagaactt

SEQ ID NO: 14690 - DNA, 21 bp, Homo sapiens
ttgtttttcgytgctttgaac

SEQ ID NO: 14691 - DNA, 21 bp, Homo sapiens
tgacacacacrggcagtaata

SEQ ID NO: 14692 - DNA, 21 bp, Homo sapiens
acttacaaacrattgcaattt

SEQ ID NO: 14693 - DNA, 21 bp, Homo sapiens
aatttggcgaraccaccatcc

SEQ ID NO: 14694 - DNA, 21 bp, Homo sapiens
tgccatctcarctgcagcata

SEQ ID NO: 14695 - DNA, 21 bp, Homo sapiens
aatatatcctyattgcagctg

SEQ ID NO: 14696 - DNA, 21 bp, Homo sapiens
cacaaagaagwtaaataccac

SEQ ID NO: 14697 - DNA, 21 bp, Homo sapiens
agcttttaagytctcttctaa

SEQ ID NO: 14698 - DNA, 21 bp, Homo sapiens
cctcctcattscatttgtgtt

SEQ ID NO: 14699 - DNA, 21 bp, Homo sapiens
agatttcatakcagatgtaca

SEQ ID NO: 14700 - DNA, 21 bp, Homo sapiens
ccttgaagggracaactaaat

SEQ ID NO: 14701 - DNA, 21 bp, Homo sapiens
tgaaaagcatwgtttgaaaag

SEQ ID NO: 14702 - DNA, 21 bp, Homo sapiens
tctattacctmcagaattagc

SEQ ID NO: 14703 - DNA, 21 bp, Homo sapiens
taacagtgggraaaatagatt

SEQ ID NO: 14704 - DNA, 21 bp, Homo sapiens
ggcacaacttragtagcaaag

SEQ ID NO: 14705 - DNA, 21 bp, Homo sapiens
atatctctcaycattaacacc

SEQ ID NO: 14706 - DNA, 21 bp, Homo sapiens
ctaccaaagayccctaaaaat

SEQ ID NO: 14707 - DNA, 21 bp, Homo sapiens
aagacaaataytaggatcatt

SEQ ID NO: 14708 - DNA, 21 bp, Homo sapiens
gaagttcatgrtactgttccc

SEQ ID NO: 14709 - DNA, 21 bp, Homo sapiens
gaaagaaaaarcttaaaaaat

SEQ ID NO: 14710 - DNA, 21 bp, Homo sapiens
aggaagattasagcagagttc

SEQ ID NO: 14711 - DNA, 21 bp, Homo sapiens
aaaactcaacsaagttaatac

SEQ ID NO: 14712 - DNA, 21 bp, Homo sapiens
cacctcatttmatttattgta

SEQ ID NO: 14713 - DNA, 21 bp, Homo sapiens
tcatgtcaggmcgtccatggg

SEQ ID NO: 14714 - DNA, 21 bp, Homo sapiens
taatattcatkcatctttggg

SEQ ID NO: 14715 - DNA, 21 bp, Homo sapiens
tagctggaaartgtcttacat

SEQ ID NO: 14716 - DNA, 21 bp, Homo sapiens
caaccagaagkctgtgaatgt

SEQ ID NO: 14717 - DNA, 21 bp, Homo sapiens
gtaagcagagmctcagcaggt

SEQ ID NO: 14718 - DNA, 21 bp, Homo sapiens
tagcacagccyggagttgcct

SEQ ID NO: 14719 - DNA, 21 bp, Homo sapiens
ccttttgcttyataggctttt

SEQ ID NO: 14720 - DNA, 21 bp, Homo sapiens
ctcactctggraattaaagca

SEQ ID NO: 14721 - DNA, 21 bp, Homo sapiens
tgtatcagtcraagttatctt

SEQ ID NO: 14722 - DNA, 21 bp, Homo sapiens
ttgtcaatggraattgtgaat

SEQ ID NO: 14723 - DNA, 21 bp, Homo sapiens
accttctatcyagcaattaat

SEQ ID NO: 14724 - DNA, 21 bp, Homo sapiens
ctggccatttmtcttctttta

SEQ ID NO: 14725 - DNA, 21 bp, Homo sapiens
tctcactcgcrtccaggctcg

SEQ ID NO: 14726 - DNA, 21 bp, Homo sapiens
gttttccatawtttttttcac

SEQ ID NO: 14727 - DNA, 21 bp, Homo sapiens
agacaactgcrtacacgtttt

SEQ ID NO: 14728 - DNA, 21 bp, Homo sapiens
tttccttaacrctctgtagtc

SEQ ID NO: 14729 - DNA, 21 bp, Homo sapiens
tactgaggacrttaccttccc

SEQ ID NO: 14730 - DNA, 21 bp, Homo sapiens
ttttttctacrttatatccat

SEQ ID NO: 14731 - DNA, 21 bp, Homo sapiens
gcttacataaygtggcaaggt

SEQ ID NO: 14732 - DNA, 21 bp, Homo sapiens
gggatatttayaggtccttgt

SEQ ID NO: 14733 - DNA, 21 bp, Homo sapiens
ggagggaagcyggtcacctca

SEQ ID NO: 14734 - DNA, 21 bp, Homo sapiens
gtgtgtacagwtatccctggc

SEQ ID NO: 14735 - DNA, 21 bp, Homo sapiens
agatgtcccaygcttttggag

SEQ ID NO: 14736 - DNA, 21 bp, Homo sapiens
tgtgtttccartatgaagaac

SEQ ID NO: 14737 - DNA, 21 bp, Homo sapiens
tataatattcytcttttgctt

SEQ ID NO: 14738 - DNA, 21 bp, Homo sapiens
tggtactgacyggctccaact

SEQ ID NO: 14739 - DNA, 21 bp, Homo sapiens
catccactccrtcccacaatg

SEQ ID NO: 14740 - DNA, 21 bp, Homo sapiens
ccaaaggttckgggattcatg

SEQ ID NO: 14741 - DNA, 21 bp, Homo sapiens
atcacagtgcrcctctcttgc

SEQ ID NO: 14742 - DNA, 21 bp, Homo sapiens
taaagatggcragtgtgtgcc

SEQ ID NO: 14743 - DNA, 21 bp, Homo sapiens
tcggtaagatsgtccccagag

SEQ ID NO: 14744 - DNA, 21 bp, Homo sapiens
tgttaaccctrtccagaaaaa

SEQ ID NO: 14745 - DNA, 21 bp, Homo sapiens
tctgtgtccaycgtgagcctc

SEQ ID NO: 14746 - DNA, 21 bp, Homo sapiens
tgcgtaaagtytagagtttac

SEQ ID NO: 14747 - DNA, 21 bp, Homo sapiens
caagggaatgrtgatgatggg

SEQ ID NO: 14748 - DNA, 21 bp, Homo sapiens
tttgcgatttkatgatgcaat

SEQ ID NO: 14749 - DNA, 21 bp, Homo sapiens
gaaatgtccasatgcaaaggt

SEQ ID NO: 14750 - DNA, 21 bp, Homo sapiens
tactcatacarttaggatttt

SEQ ID NO: 14751 - DNA, 21 bp, Homo sapiens
acaggtaaatkatgagttcac

SEQ ID NO: 14752 - DNA, 21 bp, Homo sapiens
aggcagtcttytctgcatatc

SEQ ID NO: 14753 - DNA, 21 bp, Homo sapiens
ctgagtttccraacattgtat

SEQ ID NO: 14754 - DNA, 21 bp, Homo sapiens
agtcctaggawgagggatgca

SEQ ID NO: 14755 - DNA, 21 bp, Homo sapiens
ccagtcagatrcgtagtttgc

SEQ ID NO: 14756 - DNA, 21 bp, Homo sapiens
attcaagcccrgatggtgggt

SEQ ID NO: 14757 - DNA, 21 bp, Homo sapiens
gaaccctcaayccatcaaatt

SEQ ID NO: 14758 - DNA, 21 bp, Homo sapiens
gatgaacttgygattgcttta

SEQ ID NO: 14759 - DNA, 21 bp, Homo sapiens
ttattctgttmtcttggggtg

SEQ ID NO: 14760 - DNA, 21 bp, Homo sapiens
ggatgggtacwgtaaactcag

SEQ ID NO: 14761 - DNA, 21 bp, Homo sapiens
cttttgtttcyggtccactca

SEQ ID NO: 14762 - DNA, 21 bp, Homo sapiens
cactgcatggkattgtttctc

SEQ ID NO: 14763 - DNA, 21 bp, Homo sapiens
atgaagtgaaytgtaggatgt

SEQ ID NO: 14764 - DNA, 21 bp, Homo sapiens
ctatcttactrtattacaaag

SEQ ID NO: 14765 - DNA, 21 bp, Homo sapiens
ttgataactayagtcactgta

SEQ ID NO: 14766 - DNA, 21 bp, Homo sapiens
gactttttaarttattcccca

SEQ ID NO: 14767 - DNA, 21 bp, Homo sapiens
ctttaagtatkgcacactgaa

SEQ ID NO: 14768 - DNA, 21 bp, Homo sapiens
actgctaggtktgggagccac

SEQ ID NO: 14769 - DNA, 21 bp, Homo sapiens
cagtatttttyaatggtattt

SEQ ID NO: 14770 - DNA, 21 bp, Homo sapiens
tggagccagtktgtaaattga

SEQ ID NO: 14771 - DNA, 21 bp, Homo sapiens
gggctcttgarctatcataaa

SEQ ID NO: 14772 - DNA, 21 bp, Homo sapiens
atgaactgaaytccttgtcca

SEQ ID NO: 14773 - DNA, 21 bp, Homo sapiens
ctgggctggcragtccatttc

SEQ ID NO: 14774 - DNA, 21 bp, Homo sapiens
caatgaaccaygttaacaaaa

SEQ ID NO: 14775 - DNA, 21 bp, Homo sapiens
taaggggttasggatatatag

SEQ ID NO: 14776 - DNA, 21 bp, Homo sapiens
ggatggagaartaggttaagt

SEQ ID NO: 14777 - DNA, 21 bp, Homo sapiens
ggatggctacmattcaggaga

SEQ ID NO: 14778 - DNA, 21 bp, Homo sapiens
atactagggtracggaggatt

SEQ ID NO: 14779 - DNA, 21 bp, Homo sapiens
gttaaaagtgwcaattcagaa

SEQ ID NO: 14780 - DNA, 21 bp, Homo sapiens
gcctcaatttrattttttaat

SEQ ID NO: 14781 - DNA, 21 bp, Homo sapiens
ggaaaggctawatatgaggag

SEQ ID NO: 14782 - DNA, 21 bp, Homo sapiens
ttgcctcatcsaactatgtcc

SEQ ID NO: 14783 - DNA, 21 bp, Homo sapiens
cctgtgctcckaagacccaga

SEQ ID NO: 14784 - DNA, 21 bp, Homo sapiens
agtttcacacrtatttattaa

SEQ ID NO: 14785 - DNA, 21 bp, Homo sapiens
tgagaaactamgtgatttact

SEQ ID NO: 14786 - DNA, 21 bp, Homo sapiens
actcctgttcyaatttgcact

SEQ ID NO: 14787 - DNA, 21 bp, Homo sapiens
ttaaatttgamgaggtgaaga

SEQ ID NO: 14788 - DNA, 21 bp, Homo sapiens
gatgggcagtkttaaatgaat

SEQ ID NO: 14789 - DNA, 21 bp, Homo sapiens
ccatggaacayggaatttcta

SEQ ID NO: 14790 - DNA, 21 bp, Homo sapiens
gaagacttgcrtgcccaggct

SEQ ID NO: 14791 - DNA, 21 bp, Homo sapiens
aggaataaaarcaacacaatt

SEQ ID NO: 14792 - DNA, 21 bp, Homo sapiens
tttgtttttartaaaggaaaa

SEQ ID NO: 14793 - DNA, 21 bp, Homo sapiens
cattgtggcaytgcttctaat

SEQ ID NO: 14794 - DNA, 21 bp, Homo sapiens
agactttggartttcctggaa

SEQ ID NO: 14795 - DNA, 21 bp, Homo sapiens
tacggtccacrctctccctgc

SEQ ID NO: 14796 - DNA, 21 bp, Homo sapiens
agctggttccrtgggaaatat

SEQ ID NO: 14797 - DNA, 21 bp, Homo sapiens
acatgtcagtrtctaacaata

SEQ ID NO: 14798 - DNA, 21 bp, Homo sapiens
ttcagaggtaktattattcta

SEQ ID NO: 14799 - DNA, 21 bp, Homo sapiens
ctattagtaaygatagaattg

SEQ ID NO: 14800 - DNA, 21 bp, Homo sapiens
taatttctttyagttttccgc

SEQ ID NO: 14801 - DNA, 21 bp, Homo sapiens
actaaagccaytgactaccat

SEQ ID NO: 14802 - DNA, 21 bp, Homo sapiens
acatatacctktggaaacaat

SEQ ID NO: 14803 - DNA, 21 bp, Homo sapiens
aaattaaatcwttatgaaata

SEQ ID NO: 14804 - DNA, 21 bp, Homo sapiens
cagaccttccrcagttgaaga

SEQ ID NO: 14805 - DNA, 21 bp, Homo sapiens
aggttgttcarggccaaagga

SEQ ID NO: 14806 - DNA, 21 bp, Homo sapiens
gttcccgtatrtagttggttt

SEQ ID NO: 14807 - DNA, 21 bp, Homo sapiens
agggaatccayaatcctgtgc

SEQ ID NO: 14808 - DNA, 21 bp, Homo sapiens
caaatagtcayctactctgtt

SEQ ID NO: 14809 - DNA, 21 bp, Homo sapiens
tgacaaatackgaaacatgta

SEQ ID NO: 14810 - DNA, 21 bp, Homo sapiens
aaatccctcayacgattacag

SEQ ID NO: 14811 - DNA, 21 bp, Homo sapiens
ctgacttctgytaatacccag

SEQ ID NO: 14812 - DNA, 21 bp, Homo sapiens
caaatcgtagyacccaaaaga

SEQ ID NO: 14813 - DNA, 21 bp, Homo sapiens
tttttaattgytagaaaatat

SEQ ID NO: 14814 - DNA, 21 bp, Homo sapiens
gcgacttgatktaacaacttt

SEQ ID NO: 14815 - DNA, 21 bp, Homo sapiens
agctctatacrtctgtgttgg

SEQ ID NO: 14816 - DNA, 21 bp, Homo sapiens
ataagcactaygtatatgatc

SEQ ID NO: 14817 - DNA, 21 bp, Homo sapiens
tgattcacaastttctaaaca

SEQ ID NO: 14818 - DNA, 21 bp, Homo sapiens
gctgactgacwgttctgatct

SEQ ID NO: 14819 - DNA, 21 bp, Homo sapiens
cgcaagcacargtcatttttc

SEQ ID NO: 14820 - DNA, 21 bp, Homo sapiens
ctaattatagsaacctttgta

SEQ ID NO: 14821 - DNA, 21 bp, Homo sapiens
aataaaattgrgaaaaaatat

SEQ ID NO: 14822 - DNA, 21 bp, Homo sapiens
taccagccttygttcctaact

SEQ ID NO: 14823 - DNA, 21 bp, Homo sapiens
aaaagggccargagtgaaagc

SEQ ID NO: 14824 - DNA, 21 bp, Homo sapiens
tggctggactyttcccagagc

SEQ ID NO: 14825 - DNA, 21 bp, Homo sapiens
ccctaacaaaygagtgctgga

SEQ ID NO: 14826 - DNA, 21 bp, Homo sapiens
atggaactggytgtgagtgca

SEQ ID NO: 14827 - DNA, 21 bp, Homo sapiens
tggccaataarccaaagaccc

SEQ ID NO: 14828 - DNA, 21 bp, Homo sapiens
tcccagtttcwttcatatttg

SEQ ID NO: 14829 - DNA, 21 bp, Homo sapiens
ctttttctttscatgacacat

SEQ ID NO: 14830 - DNA, 21 bp, Homo sapiens
ctgtattccayagcataaagt

SEQ ID NO: 14831 - DNA, 21 bp, Homo sapiens
gctcagatttmgtaagtctat

SEQ ID NO: 14832 - DNA, 21 bp, Homo sapiens
ccaagagaaawcccatctttt

SEQ ID NO: 14833 - DNA, 21 bp, Homo sapiens
ggcactacacwctattctaat

SEQ ID NO: 14834 - DNA, 21 bp, Homo sapiens
acaagtagaaratcaagtaga

SEQ ID NO: 14835 - DNA, 21 bp, Homo sapiens
aaatagacacrtaggtatact

SEQ ID NO: 14836 - DNA, 21 bp, Homo sapiens
tttgactttaycttacaagca

SEQ ID NO: 14837 - DNA, 21 bp, Homo sapiens
gagaatttctwtggaatgata

SEQ ID NO: 14838 - DNA, 21 bp, Homo sapiens
agttttttctygctctctcta

SEQ ID NO: 14839 - DNA, 21 bp, Homo sapiens
ctttatcagcsaggacattct

SEQ ID NO: 14840 - DNA, 21 bp, Homo sapiens
gtcagtaaaaycacacattaa

SEQ ID NO: 14841 - DNA, 21 bp, Homo sapiens
ccagcatagtktactgtcact

SEQ ID NO: 14842 - DNA, 21 bp, Homo sapiens
agcttttgtgktggttgtttt

SEQ ID NO: 14843 - DNA, 21 bp, Homo sapiens
gggatctggarggaagcttgg

SEQ ID NO: 14844 - DNA, 21 bp, Homo sapiens
agactctaaartgaaaagagc

SEQ ID NO: 14845 - DNA, 21 bp, Homo sapiens
catttcatttkacaatctgat

SEQ ID NO: 14846 - DNA, 21 bp, Homo sapiens
agtgatctcastatagcactt

SEQ ID NO: 14847 - DNA, 21 bp, Homo sapiens
tcaaggatgaytgggaaaaag

SEQ ID NO: 14848 - DNA, 21 bp, Homo sapiens
acatattgctstaaaaggctt

SEQ ID NO: 14849 - DNA, 21 bp, Homo sapiens
atgcccagaaygatatgagat

SEQ ID NO: 14850 - DNA, 21 bp, Homo sapiens
gcatttgaatytagtatgcct

SEQ ID NO: 14851 - DNA, 21 bp, Homo sapiens
ttaggtatatmtagctctcag

SEQ ID NO: 14852 - DNA, 21 bp, Homo sapiens
tagagattgtwctaatcacac

SEQ ID NO: 14853 - DNA, 21 bp, Homo sapiens
tcttttctccrttcccatgtt

SEQ ID NO: 14854 - DNA, 21 bp, Homo sapiens
aaactcttacmtgaggagaag

SEQ ID NO: 14855 - DNA, 21 bp, Homo sapiens
tacgttcaackttctattggt

SEQ ID NO: 14856 - DNA, 21 bp, Homo sapiens
cagattttcartggcctccaa

SEQ ID NO: 14857 - DNA, 21 bp, Homo sapiens
ctgtggtcccrgcagcacttc

SEQ ID NO: 14858 - DNA, 21 bp, Homo sapiens
ttatatgttcyaaaatatcaa

SEQ ID NO: 14859 - DNA, 21 bp, Homo sapiens
tgtgaagaggytgctaattaa

SEQ ID NO: 14860 - DNA, 21 bp, Homo sapiens
agtacttgtarttatttggtc

SEQ ID NO: 14861 - DNA, 21 bp, Homo sapiens
agcttgattcstattcacaaa

SEQ ID NO: 14862 - DNA, 21 bp, Homo sapiens
cctgaaaagaygaagtggctc

SEQ ID NO: 14863 - DNA, 21 bp, Homo sapiens
ttggtaccatraagctattct

SEQ ID NO: 14864 - DNA, 21 bp, Homo sapiens
cattttagtargcccaacaat

SEQ ID NO: 14865 - DNA, 21 bp, Homo sapiens
tcctggggagygtttgtctag

SEQ ID NO: 14866 - DNA, 21 bp, Homo sapiens
cagcaaaaaayggagtctgac

SEQ ID NO: 14867 - DNA, 21 bp, Homo sapiens
attttagaaartctgtaaata

SEQ ID NO: 14868 - DNA, 21 bp, Homo sapiens
ttttgagtctytctgcaacat

SEQ ID NO: 14869 - DNA, 21 bp, Homo sapiens
atatttttttwaaaaaaagaa

SEQ ID NO: 14870 - DNA, 21 bp, Homo sapiens
tttgatacacracctttatca

SEQ ID NO: 14871 - DNA, 21 bp, Homo sapiens
tccttaatctktatcctcaga

SEQ ID NO: 14872 - DNA, 21 bp, Homo sapiens
acagagaatartaactaagca

SEQ ID NO: 14873 - DNA, 21 bp, Homo sapiens
aataactgagmacaaaacact

SEQ ID NO: 14874 - DNA, 21 bp, Homo sapiens
atctggcaagstgaggaaatg

SEQ ID NO: 14875 - DNA, 21 bp, Homo sapiens
gattttatttsttcataacta

SEQ ID NO: 14876 - DNA, 21 bp, Homo sapiens
gtacccagtgytccttctcct

SEQ ID NO: 14877 - DNA, 21 bp, Homo sapiens
gcaatattttycaaaggctgg

SEQ ID NO: 14878 - DNA, 21 bp, Homo sapiens
taaacaagtarcaatatcact

SEQ ID NO: 14879 - DNA, 21 bp, Homo sapiens
gaggctgaacwtcagcaaggg

SEQ ID NO: 14880 - DNA, 21 bp, Homo sapiens
ggtatgtttgrtggaatttct

SEQ ID NO: 14881 - DNA, 21 bp, Homo sapiens
tgtggctcttycaactcagaa

SEQ ID NO: 14882 - DNA, 21 bp, Homo sapiens
cttctctccartctgtgttcc

SEQ ID NO: 14883 - DNA, 21 bp, Homo sapiens
gttaactgagwtggaaaaaca

SEQ ID NO: 14884 - DNA, 21 bp, Homo sapiens
ttttctataawgaacttgtgc

SEQ ID NO: 14885 - DNA, 21 bp, Homo sapiens
gcatgggtcaytaagaaaagc

SEQ ID NO: 14886 - DNA, 21 bp, Homo sapiens
gtagggaatcwgggctaagag

SEQ ID NO: 14887 - DNA, 21 bp, Homo sapiens
agccgagcaaytctgaagcta

SEQ ID NO: 14888 - DNA, 21 bp, Homo sapiens
ttaaattgttrcatatttagc

SEQ ID NO: 14889 - DNA, 21 bp, Homo sapiens
tgcacaaatamgagtgcaagt

SEQ ID NO: 14890 - DNA, 21 bp, Homo sapiens
ttatacctttrttcttaaaat

SEQ ID NO: 14891 - DNA, 21 bp, Homo sapiens
gtggcaaagtragtactttta

SEQ ID NO: 14892 - DNA, 21 bp, Homo sapiens
gctgtttaagytggcccagag

SEQ ID NO: 14893 - DNA, 21 bp, Homo sapiens
tggaggtatgmaacagagcag

SEQ ID NO: 14894 - DNA, 21 bp, Homo sapiens
gtcactgcaargtcttctgga

SEQ ID NO: 14895 - DNA, 21 bp, Homo sapiens
ctctctgaagytgttgtggga

SEQ ID NO: 14896 - DNA, 21 bp, Homo sapiens
aagtatgctgktatttaaaaa

SEQ ID NO: 14897 - DNA, 21 bp, Homo sapiens
actagagtgtrgatagttttg

SEQ ID NO: 14898 - DNA, 21 bp, Homo sapiens
cccgtgcataytcttcaggga

SEQ ID NO: 14899 - DNA, 21 bp, Homo sapiens
tgaatagtgcrttttcgaggt

SEQ ID NO: 14900 - DNA, 21 bp, Homo sapiens
tttggcattcrgtaattgtac

SEQ ID NO: 14901 - DNA, 21 bp, Homo sapiens
tagtctaaatrctatgccctg

SEQ ID NO: 14902 - DNA, 21 bp, Homo sapiens
aggcaaagaargagacctctg

SEQ ID NO: 14903 - DNA, 21 bp, Homo sapiens
aactaagctgrgtcaggttta

SEQ ID NO: 14904 - DNA, 21 bp, Homo sapiens
tcttttggctrtggtgtaact

SEQ ID NO: 14905 - DNA, 21 bp, Homo sapiens
ttgatagtttmcagagaatcc

SEQ ID NO: 14906 - DNA, 21 bp, Homo sapiens
ttcattcttcrgtcctagagg

SEQ ID NO: 14907 - DNA, 21 bp, Homo sapiens
tccttgccacyatcacagtca

SEQ ID NO: 14908 - DNA, 21 bp, Homo sapiens
agccaaggccwgaagcagtac

SEQ ID NO: 14909 - DNA, 21 bp, Homo sapiens
ttgaggagcakgcagtactgt

SEQ ID NO: 14910 - DNA, 21 bp, Homo sapiens
acgataatgaraataaaacgg

SEQ ID NO: 14911 - DNA, 21 bp, Homo sapiens
ttttgattgamctctgcctcc

SEQ ID NO: 14912 - DNA, 21 bp, Homo sapiens
actatgacaargctggacaga

SEQ ID NO: 14913 - DNA, 21 bp, Homo sapiens
tcaatgttctstttaccattt

SEQ ID NO: 14914 - DNA, 21 bp, Homo sapiens
actggtctacrggagtaaagg

SEQ ID NO: 14915 - DNA, 21 bp, Homo sapiens
tagtaaagtaraaaaatgact

SEQ ID NO: 14916 - DNA, 21 bp, Homo sapiens
ctgatgtactstgcaagcaat

SEQ ID NO: 14917 - DNA, 21 bp, Homo sapiens
gaaggagcctytcccaggcgg

SEQ ID NO: 14918 - DNA, 21 bp, Homo sapiens
caaagataaaycgatactttt

SEQ ID NO: 14919 - DNA, 21 bp, Homo sapiens
atgaaggcagsaagtagcaca

SEQ ID NO: 14920 - DNA, 21 bp, Homo sapiens
gcatttatgamaaatctggat

SEQ ID NO: 14921 - DNA, 21 bp, Homo sapiens
ctttagggcayggaaaacacg

SEQ ID NO: 14922 - DNA, 21 bp, Homo sapiens
aaacaaactcrtgataaggtc

SEQ ID NO: 14923 - DNA, 21 bp, Homo sapiens
aaattcacttytggttttaac

SEQ ID NO: 14924 - DNA, 21 bp, Homo sapiens
cagacctctaraaaggtttgt

SEQ ID NO: 14925 - DNA, 21 bp, Homo sapiens
gcggtttactktaactaatgt

SEQ ID NO: 14926 - DNA, 21 bp, Homo sapiens
aaataacatgwcaatgggcaa

SEQ ID NO: 14927 - DNA, 21 bp, Homo sapiens
aagagctaaartagaattgca

SEQ ID NO: 14928 - DNA, 21 bp, Homo sapiens
ctagatatttkccccatttct

SEQ ID NO: 14929 - DNA, 21 bp, Homo sapiens
ttatttttgcrtggcatgtag

SEQ ID NO: 14930 - DNA, 21 bp, Homo sapiens
tgatgaattgkttggatgttg

SEQ ID NO: 14931 - DNA, 21 bp, Homo sapiens
catattccctygttttacagt

SEQ ID NO: 14932 - DNA, 21 bp, Homo sapiens
aatctgttagyaccaagcaag

SEQ ID NO: 14933 - DNA, 21 bp, Homo sapiens
agagacccaamagaacagcaa

SEQ ID NO: 14934 - DNA, 21 bp, Homo sapiens
atatgcaattstagaatttta

SEQ ID NO: 14935 - DNA, 21 bp, Homo sapiens
catctcttatmgtccacctgt

SEQ ID NO: 14936 - DNA, 21 bp, Homo sapiens
tggaatgtgtrctggagaagg

SEQ ID NO: 14937 - DNA, 21 bp, Homo sapiens
cctttttaaawatttatttcg

SEQ ID NO: 14938 - DNA, 21 bp, Homo sapiens
ccaacactagyatactacaag

SEQ ID NO: 14939 - DNA, 21 bp, Homo sapiens
attgatgaatyacttagtgct

SEQ ID NO: 14940 - DNA, 21 bp, Homo sapiens
taaatatgcgrtgggtaaatg

SEQ ID NO: 14941 - DNA, 21 bp, Homo sapiens
caaattcttasaaagttcatc

SEQ ID NO: 14942 - DNA, 21 bp, Homo sapiens
cctcagaggaracattgatct

SEQ ID NO: 14943 - DNA, 21 bp, Homo sapiens
atttggtcccrttatgagagc

SEQ ID NO: 14944 - DNA, 21 bp, Homo sapiens
cagagtgtggmacatgggcca

SEQ ID NO: 14945 - DNA, 21 bp, Homo sapiens
attgtgttgtrtattgtaaag

SEQ ID NO: 14946 - DNA, 21 bp, Homo sapiens
ctgcttaaacygaatcttcct

SEQ ID NO: 14947 - DNA, 21 bp, Homo sapiens
ctctctgtagraagactcgca

SEQ ID NO: 14948 - DNA, 21 bp, Homo sapiens
gatgctattcmagaggatgcc

SEQ ID NO: 14949 - DNA, 21 bp, Homo sapiens
cgtggtgcccrtctgtaagta

SEQ ID NO: 14950 - DNA, 21 bp, Homo sapiens
aatatacacayactgagcaag

SEQ ID NO: 14951 - DNA, 21 bp, Homo sapiens
tcgatattacygtacttagga

SEQ ID NO: 14952 - DNA, 21 bp, Homo sapiens
atggcagaaascctaacacaa

SEQ ID NO: 14953 - DNA, 21 bp, Homo sapiens
tgacacaggamttccaaagtg

SEQ ID NO: 14954 - DNA, 21 bp, Homo sapiens
ttggagttcayagaaaagtaa

SEQ ID NO: 14955 - DNA, 21 bp, Homo sapiens
ctatcacttcyccattggata

SEQ ID NO: 14956 - DNA, 21 bp, Homo sapiens
gttttcaaagkgagccctgac

SEQ ID NO: 14957 - DNA, 21 bp, Homo sapiens
tagagggaatsttgcaaaagc

SEQ ID NO: 14958 - DNA, 21 bp, Homo sapiens
aaatgctctcraatgtaccca

SEQ ID NO: 14959 - DNA, 21 bp, Homo sapiens
taattcatttkcttctcataa

SEQ ID NO: 14960 - DNA, 21 bp, Homo sapiens
aaatcaagagyacaggcatat

SEQ ID NO: 14961 - DNA, 21 bp, Homo sapiens
aaagctgaatktgcctcttcc

SEQ ID NO: 14962 - DNA, 21 bp, Homo sapiens
catttgcaagyaccacatcta

SEQ ID NO: 14963 - DNA, 21 bp, Homo sapiens
aagtcgctgcyggttaaacac

SEQ ID NO: 14964 - DNA, 21 bp, Homo sapiens
ttcttaatttygagcgctcga

SEQ ID NO: 14965 - DNA, 21 bp, Homo sapiens
gccaacaaatrtgctcagatc

SEQ ID NO: 14966 - DNA, 21 bp, Homo sapiens
tgaataccatsaactaaaaag

SEQ ID NO: 14967 - DNA, 21 bp, Homo sapiens
ctccaaaaacrctagcgctga

SEQ ID NO: 14968 - DNA, 21 bp, Homo sapiens
gataagcaaayggagtgttaa

SEQ ID NO: 14969 - DNA, 21 bp, Homo sapiens
aggaacctgaygacaattctt

SEQ ID NO: 14970 - DNA, 21 bp, Homo sapiens
agtcacatcayagtcacaaaa

SEQ ID NO: 14971 - DNA, 21 bp, Homo sapiens
tgataaactaygtaggcacac

SEQ ID NO: 14972 - DNA, 21 bp, Homo sapiens
caagtcgtacrgaagggcccc

SEQ ID NO: 14973 - DNA, 21 bp, Homo sapiens
caatgcacagkggtcaacatg

SEQ ID NO: 14974 - DNA, 21 bp, Homo sapiens
gcaaaatatgrattcagacag

SEQ ID NO: 14975 - DNA, 21 bp, Homo sapiens
cgaatcccagyagcttgaata

SEQ ID NO: 14976 - DNA, 21 bp, Homo sapiens
attctcacaayagcccttata

SEQ ID NO: 14977 - DNA, 21 bp, Homo sapiens
ttgccttaagscacactgttt

SEQ ID NO: 14978 - DNA, 21 bp, Homo sapiens
ttatcttcatygtcctgaacc

SEQ ID NO: 14979 - DNA, 21 bp, Homo sapiens
ttgagtgaacrtcaataatct

SEQ ID NO: 14980 - DNA, 21 bp, Homo sapiens
gagtagagatkgaggcaaatg

SEQ ID NO: 14981 - DNA, 21 bp, Homo sapiens
tttaaatgggyttaactgctc

SEQ ID NO: 14982 - DNA, 21 bp, Homo sapiens
catgcccatcrtacctctact

SEQ ID NO: 14983 - DNA, 21 bp, Homo sapiens
tctggctacawctggctcaca

SEQ ID NO: 14984 - DNA, 21 bp, Homo sapiens
attataggagrcagtgagagc

SEQ ID NO: 14985 - DNA, 21 bp, Homo sapiens
tgggatataaygtttttgctc

SEQ ID NO: 14986 - DNA, 21 bp, Homo sapiens
tcaaaagcccrtttaatctgc

SEQ ID NO: 14987 - DNA, 21 bp, Homo sapiens
acctgaccacmcagttggaac

SEQ ID NO: 14988 - DNA, 21 bp, Homo sapiens
tgtagcccatsccaaggcagc

SEQ ID NO: 14989 - DNA, 21 bp, Homo sapiens
tggttccctcrtgaacatggc

SEQ ID NO: 14990 - DNA, 21 bp, Homo sapiens
tattatgtatytgttgtatgg

SEQ ID NO: 14991 - DNA, 21 bp, Homo sapiens
ggcactttctytcttcaaaac

SEQ ID NO: 14992 - DNA, 21 bp, Homo sapiens
tgttctatacmctccattttt

SEQ ID NO: 14993 - DNA, 21 bp, Homo sapiens
agggtctaaarcacgatgatg

SEQ ID NO: 14994 - DNA, 21 bp, Homo sapiens
cctggaaaaaygttcacagag

SEQ ID NO: 14995 - DNA, 21 bp, Homo sapiens
caaaaataaaygcatatggct

SEQ ID NO: 14996 - DNA, 21 bp, Homo sapiens
tgtattatagytgagaggact

SEQ ID NO: 14997 - DNA, 21 bp, Homo sapiens
ccagggccaaytggagagggc

SEQ ID NO: 14998 - DNA, 21 bp, Homo sapiens
caacaccttgwattctgactt

SEQ ID NO: 14999 - DNA, 21 bp, Homo sapiens
actgacaatgwgcaaactcac

SEQ ID NO: 15000 - DNA, 21 bp, Homo sapiens
ttctgagttaygaactgctgt

SEQ ID NO: 15001 - DNA, 21 bp, Homo sapiens
gcaaaaccacrgggaccgagc

SEQ ID NO: 15002 - DNA, 21 bp, Homo sapiens
attgaaatacrgttggatgtg

SEQ ID NO: 15003 - DNA, 21 bp, Homo sapiens
tattaacctaratttccctat

SEQ ID NO: 15004 - DNA, 21 bp, Homo sapiens
tagatcatagrtttgaactca

SEQ ID NO: 15005 - DNA, 21 bp, Homo sapiens
tgtaatgcaaygttcagctac

SEQ ID NO: 15006 - DNA, 21 bp, Homo sapiens
gggtcaccggrgacaaaagac

SEQ ID NO: 15007 - DNA, 21 bp, Homo sapiens
taagtatcaarctcgttcaat

SEQ ID NO: 15008 - DNA, 21 bp, Homo sapiens
aatacttaaarcattttaaat

SEQ ID NO: 15009 - DNA, 21 bp, Homo sapiens
gtgtctggaayccagatgagc

SEQ ID NO: 15010 - DNA, 21 bp, Homo sapiens
taacttaccargtgtttagag

SEQ ID NO: 15011 - DNA, 21 bp, Homo sapiens
gctacctcaawtgaaagtaag

SEQ ID NO: 15012 - DNA, 21 bp, Homo sapiens
taatgacaaasaagtttaaga

SEQ ID NO: 15013 - DNA, 21 bp, Homo sapiens
agctaagagtytccttttccc

SEQ ID NO: 15014 - DNA, 21 bp, Homo sapiens
cttctgcaaawataactgatt

SEQ ID NO: 15015 - DNA, 21 bp, Homo sapiens
cctgtgacttytgcatcctct

SEQ ID NO: 15016 - DNA, 21 bp, Homo sapiens
gtcggcggtgrgccttagatg

SEQ ID NO: 15017 - DNA, 21 bp, Homo sapiens
tcttcccttcyacagaggtcc

SEQ ID NO: 15018 - DNA, 21 bp, Homo sapiens
attcaccatgyatgagaagtc

SEQ ID NO: 15019 - DNA, 21 bp, Homo sapiens
cttgcatcttygttattcctg

SEQ ID NO: 15020 - DNA, 21 bp, Homo sapiens
ctacagttgaratatggtatg

SEQ ID NO: 15021 - DNA, 21 bp, Homo sapiens
gatccagattsaaatatttgg

SEQ ID NO: 15022 - DNA, 21 bp, Homo sapiens
tcaaggggagwgtgtgctcta

SEQ ID NO: 15023 - DNA, 21 bp, Homo sapiens
taggagctgargccctcaatg

SEQ ID NO: 15024 - DNA, 21 bp, Homo sapiens
acattggatgrttgctctttc

SEQ ID NO: 15025 - DNA, 21 bp, Homo sapiens
atctctacttrcatgacttta

SEQ ID NO: 15026 - DNA, 21 bp, Homo sapiens
ttggctgatgsgcagttctag

SEQ ID NO: 15027 - DNA, 21 bp, Homo sapiens
ccattatgaaytgaaaaaaaa

SEQ ID NO: 15028 - DNA, 21 bp, Homo sapiens
attatgtgtcyagtgagctgt

SEQ ID NO: 15029 - DNA, 21 bp, Homo sapiens
ttcgtgtagcrctgtttttgg

SEQ ID NO: 15030 - DNA, 21 bp, Homo sapiens
tgtcaacaaayccctgaacgt

SEQ ID NO: 15031 - DNA, 21 bp, Homo sapiens
cactcaagtarcctaatagcc

SEQ ID NO: 15032 - DNA, 21 bp, Homo sapiens
cctatgtgagygtacatgaaa

SEQ ID NO: 15033 - DNA, 21 bp, Homo sapiens
gttggacaccrtggcaggaaa

SEQ ID NO: 15034 - DNA, 21 bp, Homo sapiens
ttggcatgctrtgttctccgt

SEQ ID NO: 15035 - DNA, 21 bp, Homo sapiens
ctatactgcaycatctatacc

SEQ ID NO: 15036 - DNA, 21 bp, Homo sapiens
agccaccaagrgcgatggact

SEQ ID NO: 15037 - DNA, 21 bp, Homo sapiens
gccacgctgtkttgaggacac

SEQ ID NO: 15038 - DNA, 21 bp, Homo sapiens
acagaaaaacygcccttaaag

SEQ ID NO: 15039 - DNA, 21 bp, Homo sapiens
cgggctagtgyatcctcctca

SEQ ID NO: 15040 - DNA, 21 bp, Homo sapiens
tgagaatgtamagcacacaac

SEQ ID NO: 15041 - DNA, 21 bp, Homo sapiens
tactaataggygattgctgta

SEQ ID NO: 15042 - DNA, 21 bp, Homo sapiens
gcctactcccraaagggctca

SEQ ID NO: 15043 - DNA, 21 bp, Homo sapiens
ccatgtgaagscactcctgga

SEQ ID NO: 15044 - DNA, 21 bp, Homo sapiens
ttgtgaatgcygagctgcatc

SEQ ID NO: 15045 - DNA, 21 bp, Homo sapiens
agtcctgcacmgagtggacct

SEQ ID NO: 15046 - DNA, 21 bp, Homo sapiens
caaaggatgakgaatacatgg

SEQ ID NO: 15047 - DNA, 21 bp, Homo sapiens
gcaaaacacamggcatattaa

SEQ ID NO: 15048 - DNA, 21 bp, Homo sapiens
gagccttcttyagcacgtgct

SEQ ID NO: 15049 - DNA, 21 bp, Homo sapiens
gagctcccttygtttccatct

SEQ ID NO: 15050 - DNA, 21 bp, Homo sapiens
aagacagcaamagacagggag

SEQ ID NO: 15051 - DNA, 21 bp, Homo sapiens
gataggtgaasgaaggagtag

SEQ ID NO: 15052 - DNA, 21 bp, Homo sapiens
caggtagttawgtcagccttt

SEQ ID NO: 15053 - DNA, 21 bp, Homo sapiens
gtcccattccygcatctacct

SEQ ID NO: 15054 - DNA, 21 bp, Homo sapiens
cggaaacaagsactgtgtgca

SEQ ID NO: 15055 - DNA, 21 bp, Homo sapiens
ttcaagtctayagtagaatac

SEQ ID NO: 15056 - DNA, 21 bp, Homo sapiens
tgtaaagacaytgacaaagaa

SEQ ID NO: 15057 - DNA, 21 bp, Homo sapiens
ctgaagccaaytaactagaat

SEQ ID NO: 15058 - DNA, 21 bp, Homo sapiens
cagttcctaayctttttacat

SEQ ID NO: 15059 - DNA, 21 bp, Homo sapiens
ccagcgctttrtgatccttag

SEQ ID NO: 15060 - DNA, 21 bp, Homo sapiens
ctgctctttcwagattaaaag

SEQ ID NO: 15061 - DNA, 21 bp, Homo sapiens
ttggctctgamtagtataaaa

SEQ ID NO: 15062 - DNA, 21 bp, Homo sapiens
ttcgtgaacayctaccatgtg

SEQ ID NO: 15063 - DNA, 21 bp, Homo sapiens
caagcacctcsaggggattca

SEQ ID NO: 15064 - DNA, 21 bp, Homo sapiens
gtaaatatgasgttctcctat

SEQ ID NO: 15065 - DNA, 21 bp, Homo sapiens
tgcttctttgyatgcaattct

SEQ ID NO: 15066 - DNA, 21 bp, Homo sapiens
gagaaaatacwatgttagaaa

SEQ ID NO: 15067 - DNA, 21 bp, Homo sapiens
agtgaggagartaagggtgtg

SEQ ID NO: 15068 - DNA, 21 bp, Homo sapiens
aagaggatttkgggttctaaa

SEQ ID NO: 15069 - DNA, 21 bp, Homo sapiens
gctgagtccartcatttattc

SEQ ID NO: 15070 - DNA, 21 bp, Homo sapiens
agaatagtgasaattttagaa

SEQ ID NO: 15071 - DNA, 21 bp, Homo sapiens
gaaaacattckatagcaattc

SEQ ID NO: 15072 - DNA, 21 bp, Homo sapiens
gtggagtgtcygtattgtcag

SEQ ID NO: 15073 - DNA, 21 bp, Homo sapiens
aactaaacacsggagcattgt

SEQ ID NO: 15074 - DNA, 21 bp, Homo sapiens
tgagaaatagmccaaaaaaat

SEQ ID NO: 15075 - DNA, 21 bp, Homo sapiens
gccacttcatkaaaatatagc

SEQ ID NO: 15076 - DNA, 21 bp, Homo sapiens
attgcctgacytaaaaaacat

SEQ ID NO: 15077 - DNA, 21 bp, Homo sapiens
ttttatgaaasggtttttatg

SEQ ID NO: 15078 - DNA, 21 bp, Homo sapiens
aaagccaccawgagctagaag

SEQ ID NO: 15079 - DNA, 21 bp, Homo sapiens
tggcatggttragcattacaa

SEQ ID NO: 15080 - DNA, 21 bp, Homo sapiens
tgagtcctaaraaaaagatca

SEQ ID NO: 15081 - DNA, 21 bp, Homo sapiens
cacttgagttsttcccctctt

SEQ ID NO: 15082 - DNA, 21 bp, Homo sapiens
ctatgttggtwgtcgaatgtg

SEQ ID NO: 15083 - DNA, 21 bp, Homo sapiens
atgaaatcacstaaccaaatc

SEQ ID NO: 15084 - DNA, 21 bp, Homo sapiens
tgatttttttycttaggtgac

SEQ ID NO: 15085 - DNA, 21 bp, Homo sapiens
ttgacttcccrgctcaggtga

SEQ ID NO: 15086 - DNA, 21 bp, Homo sapiens
catttttttgragtgtagaag

SEQ ID NO: 15087 - DNA, 21 bp, Homo sapiens
aattagctttygtgaagtatt

SEQ ID NO: 15088 - DNA, 21 bp, Homo sapiens
actttaatackatttagttac

SEQ ID NO: 15089 - DNA, 21 bp, Homo sapiens
caaatttttcmtctgaaagcc

SEQ ID NO: 15090 - DNA, 21 bp, Homo sapiens
aaactttggcrggatgtagtg

SEQ ID NO: 15091 - DNA, 21 bp, Homo sapiens
gatgtcccacrttcacacaga

SEQ ID NO: 15092 - DNA, 21 bp, Homo sapiens
ggcaaaaaagwttgatttaaa

SEQ ID NO: 15093 - DNA, 21 bp, Homo sapiens
gtatatttagytggtttatgt

SEQ ID NO: 15094 - DNA, 21 bp, Homo sapiens
ctgtcaatctycattcaattt

SEQ ID NO: 15095 - DNA, 21 bp, Homo sapiens
gaggagaaaakgatgaaacat

SEQ ID NO: 15096 - DNA, 21 bp, Homo sapiens
ttccatgattytctttaccac

SEQ ID NO: 15097 - DNA, 21 bp, Homo sapiens
aattttcccakcaagtagctg

SEQ ID NO: 15098 - DNA, 21 bp, Homo sapiens
tcttcattctrctcttcacca

SEQ ID NO: 15099 - DNA, 21 bp, Homo sapiens
ttagcatcttsgtcttctgct

SEQ ID NO: 15100 - DNA, 21 bp, Homo sapiens
tcttgagaccktgagacaagc

SEQ ID NO: 15101 - DNA, 21 bp, Homo sapiens
caatgcatggrcactaataat

SEQ ID NO: 15102 - DNA, 21 bp, Homo sapiens
gctttctggcmacattgatcc

SEQ ID NO: 15103 - DNA, 21 bp, Homo sapiens
gaagaataatkggtgttagcg

SEQ ID NO: 15104 - DNA, 21 bp, Homo sapiens
taaacacaagytgcaagaccc

SEQ ID NO: 15105 - DNA, 21 bp, Homo sapiens
gagaagaaackgtgggccaaa

SEQ ID NO: 15106 - DNA, 21 bp, Homo sapiens
taaaagtagcrtttggaaatg

SEQ ID NO: 15107 - DNA, 21 bp, Homo sapiens
tgatctctcaygttcagtact

SEQ ID NO: 15108 - DNA, 21 bp, Homo sapiens
tttatagcgcrtaagtgttct

SEQ ID NO: 15109 - DNA, 21 bp, Homo sapiens
ttagccctggrccacgaagag

SEQ ID NO: 15110 - DNA, 21 bp, Homo sapiens
ctcactatatraggtcgtttc

SEQ ID NO: 15111 - DNA, 21 bp, Homo sapiens
atagcatgttsttaattaatc

SEQ ID NO: 15112 - DNA, 21 bp, Homo sapiens
ggcttgtacgstcttgtcggg

SEQ ID NO: 15113 - DNA, 21 bp, Homo sapiens
tatgatatgtrgcagctctta

SEQ ID NO: 15114 - DNA, 21 bp, Homo sapiens
cttagttctcrtgttcactct

SEQ ID NO: 15115 - DNA, 21 bp, Homo sapiens
tgctctgtaaygtttctgagg

SEQ ID NO: 15116 - DNA, 21 bp, Homo sapiens
caatgccagaraaatggctgt

SEQ ID NO: 15117 - DNA, 21 bp, Homo sapiens
tgtccagtgawttataaaata

SEQ ID NO: 15118 - DNA, 21 bp, Homo sapiens
tatgagtcaamagttggccta

SEQ ID NO: 15119 - DNA, 21 bp, Homo sapiens
caaatcatcarggaaatcaag

SEQ ID NO: 15120 - DNA, 21 bp, Homo sapiens
ctttttttttwaaattatgtt

SEQ ID NO: 15121 - DNA, 21 bp, Homo sapiens
gacatctgggyagtggacact

SEQ ID NO: 15122 - DNA, 21 bp, Homo sapiens
cattagagagraagtttacag

SEQ ID NO: 15123 - DNA, 21 bp, Homo sapiens
agaaacacagyattaaccaga

SEQ ID NO: 15124 - DNA, 21 bp, Homo sapiens
cgggcagatayctggtccagc

SEQ ID NO: 15125 - DNA, 21 bp, Homo sapiens
ggaagacgccmaatctgtaat

SEQ ID NO: 15126 - DNA, 21 bp, Homo sapiens
aaagaatgcartacatacgat

SEQ ID NO: 15127 - DNA, 21 bp, Homo sapiens
gttgctgacaktgtaatcttt

SEQ ID NO: 15128 - DNA, 21 bp, Homo sapiens
accaattgttrcatccttttg

SEQ ID NO: 15129 - DNA, 21 bp, Homo sapiens
acaaactgagyataaaaaggc

SEQ ID NO: 15130 - DNA, 21 bp, Homo sapiens
catggaagaargaggagagat

SEQ ID NO: 15131 - DNA, 21 bp, Homo sapiens
gggcctgtggyatactcagct

SEQ ID NO: 15132 - DNA, 21 bp, Homo sapiens
ccaacttgccrcatatatctt

SEQ ID NO: 15133 - DNA, 21 bp, Homo sapiens
tggtaaggaargtcagaccaa

SEQ ID NO: 15134 - DNA, 21 bp, Homo sapiens
gtttttgcccyctgagctggg

SEQ ID NO: 15135 - DNA, 21 bp, Homo sapiens
agtttcttccrctaataatac

SEQ ID NO: 15136 - DNA, 21 bp, Homo sapiens
gatctatacckcatgaatctc

SEQ ID NO: 15137 - DNA, 21 bp, Homo sapiens
gctgagcacarggcactttat

SEQ ID NO: 15138 - DNA, 21 bp, Homo sapiens
cttaattttargacacacagc

SEQ ID NO: 15139 - DNA, 21 bp, Homo sapiens
gcaggcctttyatctggacct

SEQ ID NO: 15140 - DNA, 21 bp, Homo sapiens
ttcatgttatktttttttgga

SEQ ID NO: 15141 - DNA, 21 bp, Homo sapiens
ttgtggcactrcattagcctt

SEQ ID NO: 15142 - DNA, 21 bp, Homo sapiens
tggaaatcagycctgctctca

SEQ ID NO: 15143 - DNA, 21 bp, Homo sapiens
cctcttttgcrttctttatga

SEQ ID NO: 15144 - DNA, 21 bp, Homo sapiens
ctgctgttgaytggcttctgg

SEQ ID NO: 15145 - DNA, 21 bp, Homo sapiens
gtttatatacytttgtggatt

SEQ ID NO: 15146 - DNA, 21 bp, Homo sapiens
gctggaaattyggggaatcac

SEQ ID NO: 15147 - DNA, 21 bp, Homo sapiens
aaaggcaaaastgactgcact

SEQ ID NO: 15148 - DNA, 21 bp, Homo sapiens
caaaggacgcygaacagttgg

SEQ ID NO: 15149 - DNA, 21 bp, Homo sapiens
agggaaggtgkgtgctgcatc

SEQ ID NO: 15150 - DNA, 21 bp, Homo sapiens
atttcacacaytgactacaga

SEQ ID NO: 15151 - DNA, 21 bp, Homo sapiens
tgcttgaattrcttcccgagt

SEQ ID NO: 15152 - DNA, 21 bp, Homo sapiens
aagatacaccrgaaagcaagc

SEQ ID NO: 15153 - DNA, 21 bp, Homo sapiens
ccatagcttasatccattcaa

SEQ ID NO: 15154 - DNA, 21 bp, Homo sapiens
agttcagttcygggtaatctt

SEQ ID NO: 15155 - DNA, 21 bp, Homo sapiens
tctgtaaaatsggaatactag

SEQ ID NO: 15156 - DNA, 21 bp, Homo sapiens
agttaggcgtmtctcatccct

SEQ ID NO: 15157 - DNA, 21 bp, Homo sapiens
ccctgcttgcyttctccacaa

SEQ ID NO: 15158 - DNA, 21 bp, Homo sapiens
ggctcagaggwttgggtccat

SEQ ID NO: 15159 - DNA, 21 bp, Homo sapiens
atttctgcttytcacaaggga

SEQ ID NO: 15160 - DNA, 21 bp, Homo sapiens
gagtgcagaaycgtcccaggc

SEQ ID NO: 15161 - DNA, 21 bp, Homo sapiens
gtcgcctaacytctgctcttc

SEQ ID NO: 15162 - DNA, 21 bp, Homo sapiens
gctaacagtgrggaaaggcct

SEQ ID NO: 15163 - DNA, 21 bp, Homo sapiens
ctcagagtgtragtttctggc

SEQ ID NO: 15164 - DNA, 21 bp, Homo sapiens
gctgtttatgwagctctacct

SEQ ID NO: 15165 - DNA, 21 bp, Homo sapiens
tatgctggtaytacaaactga

SEQ ID NO: 15166 - DNA, 21 bp, Homo sapiens
tcatggtaccmcaacgatgaa

SEQ ID NO: 15167 - DNA, 21 bp, Homo sapiens
taggggacatrtaactctctt

SEQ ID NO: 15168 - DNA, 21 bp, Homo sapiens
ctttgttggtrggtaaactga

SEQ ID NO: 15169 - DNA, 21 bp, Homo sapiens
aagatatgaaycaaagaaaac

SEQ ID NO: 15170 - DNA, 21 bp, Homo sapiens
gtaataaaatygtcaaaaata

SEQ ID NO: 15171 - DNA, 21 bp, Homo sapiens
ctgtcctaccktaaggaattt

SEQ ID NO: 15172 - DNA, 21 bp, Homo sapiens
tgtggttgtcmgcctgaaaga

SEQ ID NO: 15173 - DNA, 21 bp, Homo sapiens
gaaatggcctytaacccaatt

SEQ ID NO: 15174 - DNA, 21 bp, Homo sapiens
caagaacttcrgggtgaacac

SEQ ID NO: 15175 - DNA, 21 bp, Homo sapiens
tggaccaacayttcctttgtc

SEQ ID NO: 15176 - DNA, 21 bp, Homo sapiens
aaaccatcacratagtctagt

SEQ ID NO: 15177 - DNA, 21 bp, Homo sapiens
tttgctgtccrtacctccctt

SEQ ID NO: 15178 - DNA, 21 bp, Homo sapiens
atatagcaatwctctaaattt

SEQ ID NO: 15179 - DNA, 21 bp, Homo sapiens
catcggttctwcttatcagca

SEQ ID NO: 15180 - DNA, 21 bp, Homo sapiens
tataaaagccrgattacctat

SEQ ID NO: 15181 - DNA, 21 bp, Homo sapiens
ccaaaggacaycctggaaact

SEQ ID NO: 15182 - DNA, 21 bp, Homo sapiens
tctaaaaggcygagattaggg

SEQ ID NO: 15183 - DNA, 21 bp, Homo sapiens
aaggcttgttkgagttgagtc

SEQ ID NO: 15184 - DNA, 21 bp, Homo sapiens
attaggaataygcaaacatta

SEQ ID NO: 15185 - DNA, 21 bp, Homo sapiens
agcttgggctscgtgcgttct

SEQ ID NO: 15186 - DNA, 21 bp, Homo sapiens
caggatctggsaaagggagag

SEQ ID NO: 15187 - DNA, 21 bp, Homo sapiens
ctccaggaagrgcatggacta

SEQ ID NO: 15188 - DNA, 21 bp, Homo sapiens
cagatacggtragactcagga

SEQ ID NO: 15189 - DNA, 21 bp, Homo sapiens
atggctactcygaatttaaat

SEQ ID NO: 15190 - DNA, 21 bp, Homo sapiens
aagattttcarccatatctgt

SEQ ID NO: 15191 - DNA, 21 bp, Homo sapiens
tctgcatgccwttcttttcga

SEQ ID NO: 15192 - DNA, 21 bp, Homo sapiens
atgagatggtyctccaagagc

SEQ ID NO: 15193 - DNA, 21 bp, Homo sapiens
gctttggtccmctcatctctg

SEQ ID NO: 15194 - DNA, 21 bp, Homo sapiens
ataccaatctrttgtctgcta

SEQ ID NO: 15195 - DNA, 21 bp, Homo sapiens
aatgctgaatyggatagaaca

SEQ ID NO: 15196 - DNA, 21 bp, Homo sapiens
taaacaaaaayggtacattca

SEQ ID NO: 15197 - DNA, 21 bp, Homo sapiens
taataggaacmccagagaggt

SEQ ID NO: 15198 - DNA, 21 bp, Homo sapiens
ttgaggtcttsctcgggacta

SEQ ID NO: 15199 - DNA, 21 bp, Homo sapiens
aatcaggacarttctgaaaca

SEQ ID NO: 15200 - DNA, 21 bp, Homo sapiens
tagatattctsagggttatca

SEQ ID NO: 15201 - DNA, 21 bp, Homo sapiens
ttgaagccagragcttgcttt

SEQ ID NO: 15202 - DNA, 21 bp, Homo sapiens
gagctgatgakgtaaggatac

SEQ ID NO: 15203 - DNA, 21 bp, Homo sapiens
ggtgttttttwgttgagtgct

SEQ ID NO: 15204 - DNA, 21 bp, Homo sapiens
taaagttggcrttgagaaaac

SEQ ID NO: 15205 - DNA, 21 bp, Homo sapiens
atgctccatgrtaagtggtaa

SEQ ID NO: 15206 - DNA, 21 bp, Homo sapiens
atgagtcattytatgttactt

SEQ ID NO: 15207 - DNA, 21 bp, Homo sapiens
acagttgaaayggtggcttca

SEQ ID NO: 15208 - DNA, 21 bp, Homo sapiens
gataagacccyagttttccat

SEQ ID NO: 15209 - DNA, 21 bp, Homo sapiens
gttgatgacaraacgaagaca

SEQ ID NO: 15210 - DNA, 21 bp, Homo sapiens
acttatgactrtggctctctc

SEQ ID NO: 15211 - DNA, 21 bp, Homo sapiens
aaaaatcctcmtcgcttttaa

SEQ ID NO: 15212 - DNA, 21 bp, Homo sapiens
ctcttagaatygtaaggccag

SEQ ID NO: 15213 - DNA, 21 bp, Homo sapiens
gtgagaacaayctagtcctaa

SEQ ID NO: 15214 - DNA, 21 bp, Homo sapiens
ccaccatacamgtagcaaact

SEQ ID NO: 15215 - DNA, 21 bp, Homo sapiens
aatcattgtgyccatcccgta

SEQ ID NO: 15216 - DNA, 21 bp, Homo sapiens
gggatgaaaarcaggcccacc

SEQ ID NO: 15217 - DNA, 21 bp, Homo sapiens
tgtgtgtggcwattgaacatg

SEQ ID NO: 15218 - DNA, 21 bp, Homo sapiens
acttgtgttgmggaaccagag

SEQ ID NO: 15219 - DNA, 21 bp, Homo sapiens
gagtgctgatrggaactccaa

SEQ ID NO: 15220 - DNA, 21 bp, Homo sapiens
ggaaaggggaycagaaacggg

SEQ ID NO: 15221 - DNA, 21 bp, Homo sapiens
ccccgagactmgtccctgcag

SEQ ID NO: 15222 - DNA, 21 bp, Homo sapiens
ttggctggccyggaagatcat

SEQ ID NO: 15223 - DNA, 21 bp, Homo sapiens
aaaaacattgygtcacaggat

SEQ ID NO: 15224 - DNA, 21 bp, Homo sapiens
agggacaaaargaagtagaat

SEQ ID NO: 15225 - DNA, 21 bp, Homo sapiens
actcttgcagrgcgaggtgag

SEQ ID NO: 15226 - DNA, 21 bp, Homo sapiens
catttcacacwtacatgcaga

SEQ ID NO: 15227 - DNA, 21 bp, Homo sapiens
attggtcactstttaccaatt

SEQ ID NO: 15228 - DNA, 21 bp, Homo sapiens
tgaatggaacmtgctttgtgg

SEQ ID NO: 15229 - DNA, 21 bp, Homo sapiens
cagtgggcctsacatcaaggc

SEQ ID NO: 15230 - DNA, 21 bp, Homo sapiens
gcttagaaccrtatctgtccc

SEQ ID NO: 15231 - DNA, 21 bp, Homo sapiens
atgaccactcrtatttccaag

SEQ ID NO: 15232 - DNA, 21 bp, Homo sapiens
gagatggtaaygatactttct

SEQ ID NO: 15233 - DNA, 21 bp, Homo sapiens
ttgtgtctttyttgtcaaacc

SEQ ID NO: 15234 - DNA, 21 bp, Homo sapiens
tcagcttccayagagaacatt

SEQ ID NO: 15235 - DNA, 21 bp, Homo sapiens
tccttcaaagyagggaaaagt

SEQ ID NO: 15236 - DNA, 21 bp, Homo sapiens
agtagagggasatttctccaa

SEQ ID NO: 15237 - DNA, 21 bp, Homo sapiens
gaaggaagccsgagaatccat

SEQ ID NO: 15238 - DNA, 21 bp, Homo sapiens
taagtaaagayggtgaagcca

SEQ ID NO: 15239 - DNA, 21 bp, Homo sapiens
gttgtgattgmagataaaagg

SEQ ID NO: 15240 - DNA, 21 bp, Homo sapiens
cactgcacccrcccataagct

SEQ ID NO: 15241 - DNA, 21 bp, Homo sapiens
aatctttcatytatctacttt

SEQ ID NO: 15242 - DNA, 21 bp, Homo sapiens
catggccagcsatctgaaaga

SEQ ID NO: 15243 - DNA, 21 bp, Homo sapiens
gaggttccacyggcttgcatg

SEQ ID NO: 15244 - DNA, 21 bp, Homo sapiens
gatgttacgtytggcaaatat

SEQ ID NO: 15245 - DNA, 21 bp, Homo sapiens
cactaattacrccaactaatt

SEQ ID NO: 15246 - DNA, 21 bp, Homo sapiens
atcaccatgcrtcattacaca

SEQ ID NO: 15247 - DNA, 21 bp, Homo sapiens
gtaaaatagcyagcagttacc

SEQ ID NO: 15248 - DNA, 21 bp, Homo sapiens
tacagcttccrgtaacccaaa

SEQ ID NO: 15249 - DNA, 21 bp, Homo sapiens
gatttcttagycttctcccct

SEQ ID NO: 15250 - DNA, 21 bp, Homo sapiens
cagtggaaacyaaaatgttct

SEQ ID NO: 15251 - DNA, 21 bp, Homo sapiens
taatcacagtraagtacagat

SEQ ID NO: 15252 - DNA, 21 bp, Homo sapiens
tccattgtatrtatatttata

SEQ ID NO: 15253 - DNA, 21 bp, Homo sapiens
cacatagcagrcctttagagg

SEQ ID NO: 15254 - DNA, 21 bp, Homo sapiens
tttaggagggygtctctgctt

SEQ ID NO: 15255 - DNA, 21 bp, Homo sapiens
ttccattacaraattctccca

SEQ ID NO: 15256 - DNA, 21 bp, Homo sapiens
aaattcaatcycaaaacccat

SEQ ID NO: 15257 - DNA, 21 bp, Homo sapiens
agctgggagasagttggagga

SEQ ID NO: 15258 - DNA, 21 bp, Homo sapiens
tggtgaaggcrggaagaggct

SEQ ID NO: 15259 - DNA, 21 bp, Homo sapiens
cttctccaatyatttatacag

SEQ ID NO: 15260 - DNA, 21 bp, Homo sapiens
tttgttaaaaygccttgagtc

SEQ ID NO: 15261 - DNA, 21 bp, Homo sapiens
ttggcaattartgctttagct

SEQ ID NO: 15262 - DNA, 21 bp, Homo sapiens
gggcaaggaaratgaacaagc

SEQ ID NO: 15263 - DNA, 21 bp, Homo sapiens
aacaaatgaaygtaggaacaa

SEQ ID NO: 15264 - DNA, 21 bp, Homo sapiens
acattggataytagtgtcaat

SEQ ID NO: 15265 - DNA, 21 bp, Homo sapiens
tgtcaaatacwagggtcctga

SEQ ID NO: 15266 - DNA, 21 bp, Homo sapiens
gcccaaaggtrtatacctgat

SEQ ID NO: 15267 - DNA, 21 bp, Homo sapiens
aagcattttgkaaaacaaagt

SEQ ID NO: 15268 - DNA, 21 bp, Homo sapiens
tccacttagawtaatgacttc

SEQ ID NO: 15269 - DNA, 21 bp, Homo sapiens
taccaagaagmgtaacaacta

SEQ ID NO: 15270 - DNA, 21 bp, Homo sapiens
atcagtggtcrgttattacat

SEQ ID NO: 15271 - DNA, 21 bp, Homo sapiens
actcagtaaayatctggctga

SEQ ID NO: 15272 - DNA, 21 bp, Homo sapiens
ttcttatcctytccactaccc

SEQ ID NO: 15273 - DNA, 21 bp, Homo sapiens
aaactgtcggrctgggctgac

SEQ ID NO: 15274 - DNA, 21 bp, Homo sapiens
tagatcttacstggagccaaa

SEQ ID NO: 15275 - DNA, 21 bp, Homo sapiens
gattatcgttygtctttcctt

SEQ ID NO: 15276 - DNA, 21 bp, Homo sapiens
atttatgccarctgttgtacc

SEQ ID NO: 15277 - DNA, 21 bp, Homo sapiens
ggaaagacttkccttgctttg

SEQ ID NO: 15278 - DNA, 21 bp, Homo sapiens
gcctggctttrcatcagcctc

SEQ ID NO: 15279 - DNA, 21 bp, Homo sapiens
aaatcacaccktagcttcccc

SEQ ID NO: 15280 - DNA, 21 bp, Homo sapiens
tgaatatccastgacaatgaa

SEQ ID NO: 15281 - DNA, 21 bp, Homo sapiens
cctctggaatrtgtgatataa

SEQ ID NO: 15282 - DNA, 21 bp, Homo sapiens
ctctaaagaargccctggact

SEQ ID NO: 15283 - DNA, 21 bp, Homo sapiens
cctccttctgkttctctttgg

SEQ ID NO: 15284 - DNA, 21 bp, Homo sapiens
gctagtttgtrgaacaatgca

SEQ ID NO: 15285 - DNA, 21 bp, Homo sapiens
gtgatcctctstctgctccca

SEQ ID NO: 15286 - DNA, 21 bp, Homo sapiens
ccagtggtgasagaatggaag

SEQ ID NO: 15287 - DNA, 21 bp, Homo sapiens
agaaatgtgtktatgtcatca

SEQ ID NO: 15288 - DNA, 21 bp, Homo sapiens
aaaataatagratttgtggat

SEQ ID NO: 15289 - DNA, 21 bp, Homo sapiens
caccaaggccrcaggtagtta

SEQ ID NO: 15290 - DNA, 21 bp, Homo sapiens
tctattaagckctaagcctca

SEQ ID NO: 15291 - DNA, 21 bp, Homo sapiens
aggaagccaarcccacagctc

SEQ ID NO: 15292 - DNA, 21 bp, Homo sapiens
tgtctctgctkggtgtcaaca

SEQ ID NO: 15293 - DNA, 21 bp, Homo sapiens
tggtctctacytcccagggat

SEQ ID NO: 15294 - DNA, 21 bp, Homo sapiens
ctgagaaaatrggtttaagtc

SEQ ID NO: 15295 - DNA, 21 bp, Homo sapiens
gaaatactcaygagacttgct

SEQ ID NO: 15296 - DNA, 21 bp, Homo sapiens
gaatcatggcrcagaaagata

SEQ ID NO: 15297 - DNA, 21 bp, Homo sapiens
tatctatcatytaaccataac

SEQ ID NO: 15298 - DNA, 21 bp, Homo sapiens
ctctggcagcyggaagcaggc

SEQ ID NO: 15299 - DNA, 21 bp, Homo sapiens
gtggcagtcaktatatttatt

SEQ ID NO: 15300 - DNA, 21 bp, Homo sapiens
acagattgagragttctacac

SEQ ID NO: 15301 - DNA, 21 bp, Homo sapiens
tgtcccatgaractgtggctc

SEQ ID NO: 15302 - DNA, 21 bp, Homo sapiens
agatgaagacygtgagaccag

SEQ ID NO: 15303 - DNA, 21 bp, Homo sapiens
cacttgatttytcttgttaca

SEQ ID NO: 15304 - DNA, 21 bp, Homo sapiens
tgtgagactgyaaattaatga

SEQ ID NO: 15305 - DNA, 21 bp, Homo sapiens
ttttcaaaatrtcttcccctg

SEQ ID NO: 15306 - DNA, 21 bp, Homo sapiens
ggagagacctwcctagggatc

SEQ ID NO: 15307 - DNA, 21 bp, Homo sapiens
caccccactamattgtgcagt

SEQ ID NO: 15308 - DNA, 21 bp, Homo sapiens
ttcatgagtgstgtcttaaca

SEQ ID NO: 15309 - DNA, 21 bp, Homo sapiens
actaaaaatgrcatatttcat

SEQ ID NO: 15310 - DNA, 21 bp, Homo sapiens
ggtccaggcarattaataata

SEQ ID NO: 15311 - DNA, 21 bp, Homo sapiens
atgagagtgaytttctgattc

SEQ ID NO: 15312 - DNA, 21 bp, Homo sapiens
tagatccaccrtcctctaggt

SEQ ID NO: 15313 - DNA, 21 bp, Homo sapiens
tgcaaactggygggtcagtga

SEQ ID NO: 15314 - DNA, 21 bp, Homo sapiens
cagagattccrgggactaaaa

SEQ ID NO: 15315 - DNA, 21 bp, Homo sapiens
tcagcttcatycacaattatc

SEQ ID NO: 15316 - DNA, 21 bp, Homo sapiens
gactcatctgygggatcttgc

SEQ ID NO: 15317 - DNA, 21 bp, Homo sapiens
gtagacttccrctggatcaca

SEQ ID NO: 15318 - DNA, 21 bp, Homo sapiens
ctatgcaaagscaaggcatgc

SEQ ID NO: 15319 - DNA, 21 bp, Homo sapiens
cttatggtccrtgcattccat

SEQ ID NO: 15320 - DNA, 21 bp, Homo sapiens
gactttgaaaytgaccagtag

SEQ ID NO: 15321 - DNA, 21 bp, Homo sapiens
gtgcccatagytgcggtgatc

SEQ ID NO: 15322 - DNA, 21 bp, Homo sapiens
tacattgaaakgcacagaaat

SEQ ID NO: 15323 - DNA, 21 bp, Homo sapiens
gatgggaaagktgaagcgaag

SEQ ID NO: 15324 - DNA, 21 bp, Homo sapiens
ctggcccatargagcagttct

SEQ ID NO: 15325 - DNA, 21 bp, Homo sapiens
ggctaattgtktggctttcaa

SEQ ID NO: 15326 - DNA, 21 bp, Homo sapiens
aaatctttccmgctccaattt

SEQ ID NO: 15327 - DNA, 21 bp, Homo sapiens
ctctgcaggcycttggtcttc

SEQ ID NO: 15328 - DNA, 21 bp, Homo sapiens
atgagacccarcaggctttga

SEQ ID NO: 15329 - DNA, 21 bp, Homo sapiens
tagaaactttsagaacccctt

SEQ ID NO: 15330 - DNA, 21 bp, Homo sapiens
agatattctcyggagtcccaa

SEQ ID NO: 15331 - DNA, 21 bp, Homo sapiens
cctctgtaaayggcagcctat

SEQ ID NO: 15332 - DNA, 21 bp, Homo sapiens
accttggcaaytgcatctgca

SEQ ID NO: 15333 - DNA, 21 bp, Homo sapiens
accatgaaatkctatgggaga

SEQ ID NO: 15334 - DNA, 21 bp, Homo sapiens
ggcagggccarcatttcaggc

SEQ ID NO: 15335 - DNA, 21 bp, Homo sapiens
ccataagaatrtcccctggtg

SEQ ID NO: 15336 - DNA, 21 bp, Homo sapiens
ttaaagaggcrttgatgagaa

SEQ ID NO: 15337 - DNA, 21 bp, Homo sapiens
cgcaaactgarttattccaag

SEQ ID NO: 15338 - DNA, 21 bp, Homo sapiens
ccaataatttrcaaaaaggat

SEQ ID NO: 15339 - DNA, 21 bp, Homo sapiens
aagaatcacamggccacagat

SEQ ID NO: 15340 - DNA, 21 bp, Homo sapiens
cctcaccatcrcacaccattg

SEQ ID NO: 15341 - DNA, 21 bp, Homo sapiens
acttgctgggygggcagagaa

SEQ ID NO: 15342 - DNA, 21 bp, Homo sapiens
ggaggctgagyggctgcaaaa

SEQ ID NO: 15343 - DNA, 21 bp, Homo sapiens
gagcaactgtytagagggatt

SEQ ID NO: 15344 - DNA, 21 bp, Homo sapiens
tacatgagaartgcctagacc

SEQ ID NO: 15345 - DNA, 21 bp, Homo sapiens
actcataggayatggctaaag

SEQ ID NO: 15346 - DNA, 21 bp, Homo sapiens
ctccatcaccrttagagaaaa

SEQ ID NO: 15347 - DNA, 21 bp, Homo sapiens
aaagtgtcatygaagaatctt

SEQ ID NO: 15348 - DNA, 21 bp, Homo sapiens
acagaaattcytcactgaaga

SEQ ID NO: 15349 - DNA, 21 bp, Homo sapiens
gaccctcatcmatctgggaga

SEQ ID NO: 15350 - DNA, 21 bp, Homo sapiens
aaaagttgtayttggattgtg

SEQ ID NO: 15351 - DNA, 21 bp, Homo sapiens
gtcatgtgatrggcatccctt

SEQ ID NO: 15352 - DNA, 21 bp, Homo sapiens
aattaagaagygtgtttttaa

SEQ ID NO: 15353 - DNA, 21 bp, Homo sapiens
atagtggttaygtatttttat

SEQ ID NO: 15354 - DNA, 21 bp, Homo sapiens
tatgtttgtartgtcttaggg

SEQ ID NO: 15355 - DNA, 21 bp, Homo sapiens
cctttttttcrtgtagcctga

SEQ ID NO: 15356 - DNA, 21 bp, Homo sapiens
ctatttgccaraaatggtgtc

SEQ ID NO: 15357 - DNA, 21 bp, Homo sapiens
aaacctttagytcaagaaaca

SEQ ID NO: 15358 - DNA, 21 bp, Homo sapiens
tgatagtgggrgagtacagtc

SEQ ID NO: 15359 - DNA, 21 bp, Homo sapiens
agaagaggatrctagcagacc

SEQ ID NO: 15360 - DNA, 21 bp, Homo sapiens
agtgagtagaraatgaaaaca

SEQ ID NO: 15361 - DNA, 21 bp, Homo sapiens
gcaaaattacrggggacactg

SEQ ID NO: 15362 - DNA, 21 bp, Homo sapiens
cttttccttcygaatttcctt

SEQ ID NO: 15363 - DNA, 21 bp, Homo sapiens
tagtggacagygaacagatac

SEQ ID NO: 15364 - DNA, 21 bp, Homo sapiens
aagcattccargctcttcttg

SEQ ID NO: 15365 - DNA, 21 bp, Homo sapiens
tttaacatacwggttttctaa

SEQ ID NO: 15366 - DNA, 21 bp, Homo sapiens
tattatttttwaaatgtggta

SEQ ID NO: 15367 - DNA, 21 bp, Homo sapiens
atatgtaagaractgtttgtt

SEQ ID NO: 15368 - DNA, 21 bp, Homo sapiens
ctcctctgaartgacttgtta

SEQ ID NO: 15369 - DNA, 21 bp, Homo sapiens
tttaaatcaarcagaaaatat

SEQ ID NO: 15370 - DNA, 21 bp, Homo sapiens
aagacatatcrtatgctctct

SEQ ID NO: 15371 - DNA, 21 bp, Homo sapiens
caaagggaatyggtggcagaa

SEQ ID NO: 15372 - DNA, 21 bp, Homo sapiens
agatcgcagtmgcttatagca

SEQ ID NO: 15373 - DNA, 21 bp, Homo sapiens
ctgcctaacamaagaaagggt

SEQ ID NO: 15374 - DNA, 21 bp, Homo sapiens
tatgtgtagaygtcacaaaat

SEQ ID NO: 15375 - DNA, 21 bp, Homo sapiens
gtgaaaaagcrtagtattcag

SEQ ID NO: 15376 - DNA, 21 bp, Homo sapiens
ctactttttamaaatctttta

SEQ ID NO: 15377 - DNA, 21 bp, Homo sapiens
tagagatacawcctttgcatg

SEQ ID NO: 15378 - DNA, 21 bp, Homo sapiens
aatctaaagasttaaaatgga

SEQ ID NO: 15379 - DNA, 21 bp, Homo sapiens
tgcatttacaytttgaacact

SEQ ID NO: 15380 - DNA, 21 bp, Homo sapiens
ccaaagttttwgcagcaatgt

SEQ ID NO: 15381 - DNA, 21 bp, Homo sapiens
agtaaaaatgytttcttgagt

SEQ ID NO: 15382 - DNA, 21 bp, Homo sapiens
acctatggacktcatgaaagg

SEQ ID NO: 15383 - DNA, 21 bp, Homo sapiens
ctcactgggtrtcaaggcaag

SEQ ID NO: 15384 - DNA, 21 bp, Homo sapiens
gctgctgctgytgcaaaggct

SEQ ID NO: 15385 - DNA, 21 bp, Homo sapiens
taaattgaaakaagtagaatt

SEQ ID NO: 15386 - DNA, 21 bp, Homo sapiens
ggaggcagatrtgaagctttt

SEQ ID NO: 15387 - DNA, 21 bp, Homo sapiens
aagtttctctraatcctttcc

SEQ ID NO: 15388 - DNA, 21 bp, Homo sapiens
gggcttttggstattcttgtt

SEQ ID NO: 15389 - DNA, 21 bp, Homo sapiens
taaccttttcyacccttatgg

SEQ ID NO: 15390 - DNA, 21 bp, Homo sapiens
tcttcggggcyctttcccact

SEQ ID NO: 15391 - DNA, 21 bp, Homo sapiens
cctacagtctrtccaggtgac

SEQ ID NO: 15392 - DNA, 21 bp, Homo sapiens
tctgttaggcrattttccatc

SEQ ID NO: 15393 - DNA, 21 bp, Homo sapiens
gagattttctsaaccacagac

SEQ ID NO: 15394 - DNA, 21 bp, Homo sapiens
tctccacgtgycactgaagtc

SEQ ID NO: 15395 - DNA, 21 bp, Homo sapiens
tgagcaccacrctcgtggaat

SEQ ID NO: 15396 - DNA, 21 bp, Homo sapiens
gaccaggggaragaattgagc

SEQ ID NO: 15397 - DNA, 21 bp, Homo sapiens
actgaaaccaytgctcaccgt

SEQ ID NO: 15398 - DNA, 21 bp, Homo sapiens
ctatttgacaytgacttgttc

SEQ ID NO: 15399 - DNA, 21 bp, Homo sapiens
ttgtatccgasacatctaatg

SEQ ID NO: 15400 - DNA, 21 bp, Homo sapiens
tctacatcctygggaaaaaac

SEQ ID NO: 15401 - DNA, 21 bp, Homo sapiens
ttcttagtatyggccaaagtg

SEQ ID NO: 15402 - DNA, 21 bp, Homo sapiens
actgcaccctytacatcttgg

SEQ ID NO: 15403 - DNA, 21 bp, Homo sapiens
gtgtttatcargccagagtcg

SEQ ID NO: 15404 - DNA, 21 bp, Homo sapiens
ggtaagaactygggtgagact

SEQ ID NO: 15405 - DNA, 21 bp, Homo sapiens
ccaccaaaaaygaggtattgt

SEQ ID NO: 15406 - DNA, 21 bp, Homo sapiens
tgggctaactyctccgccccc

SEQ ID NO: 15407 - DNA, 21 bp, Homo sapiens
ctccaacataygtgtttactg

SEQ ID NO: 15408 - DNA, 21 bp, Homo sapiens
tggaacagtgractaaggttt

SEQ ID NO: 15409 - DNA, 21 bp, Homo sapiens
aggtgaaggcragaactctgg

SEQ ID NO: 15410 - DNA, 21 bp, Homo sapiens
gttcagactartttgagttct

SEQ ID NO: 15411 - DNA, 21 bp, Homo sapiens
tggccacctcrtagatgacag

SEQ ID NO: 15412 - DNA, 21 bp, Homo sapiens
cagtagaaacraactgggatc

SEQ ID NO: 15413 - DNA, 21 bp, Homo sapiens
cacaacctcastgtcttcata

SEQ ID NO: 15414 - DNA, 21 bp, Homo sapiens
tcaggggcccrtgccctacct

SEQ ID NO: 15415 - DNA, 21 bp, Homo sapiens
aaattgtattygtctctttat

SEQ ID NO: 15416 - DNA, 21 bp, Homo sapiens
catcccaaagrtccgaaagaa

SEQ ID NO: 15417 - DNA, 21 bp, Homo sapiens
gcacaatgctrtcgtcttcct

SEQ ID NO: 15418 - DNA, 21 bp, Homo sapiens
ctgcaccgacyttttcttcca

SEQ ID NO: 15419 - DNA, 21 bp, Homo sapiens
acctgccaaaytgagttgcag

SEQ ID NO: 15420 - DNA, 21 bp, Homo sapiens
aacctgctgargtgacaaagg

SEQ ID NO: 15421 - DNA, 21 bp, Homo sapiens
ttgaacaggawgattgttact

SEQ ID NO: 15422 - DNA, 21 bp, Homo sapiens
ctctagttccrtaaaatgtcg

SEQ ID NO: 15423 - DNA, 21 bp, Homo sapiens
taattcaacawaacccactct

SEQ ID NO: 15424 - DNA, 21 bp, Homo sapiens
ggctaaaaaaygcttctgtaa

SEQ ID NO: 15425 - DNA, 21 bp, Homo sapiens
aaactttagamaaaggctttg

SEQ ID NO: 15426 - DNA, 21 bp, Homo sapiens
tcctgtaagasttccacaatg

SEQ ID NO: 15427 - DNA, 21 bp, Homo sapiens
ataccattccrcataaataac

SEQ ID NO: 15428 - DNA, 21 bp, Homo sapiens
aaacagtattyatccttgagg

SEQ ID NO: 15429 - DNA, 21 bp, Homo sapiens
tgtttacgcaracacaaagct

SEQ ID NO: 15430 - DNA, 21 bp, Homo sapiens
taaattctcaraaatcaaata

SEQ ID NO: 15431 - DNA, 21 bp, Homo sapiens
caatcaatctkcagaggcaca

SEQ ID NO: 15432 - DNA, 21 bp, Homo sapiens
ggagtggagarttaaaaagtt

SEQ ID NO: 15433 - DNA, 21 bp, Homo sapiens
ttatggatgtragttcacagt

SEQ ID NO: 15434 - DNA, 21 bp, Homo sapiens
ttgcttcaggratttcatgga

SEQ ID NO: 15435 - DNA, 21 bp, Homo sapiens
aaagtgttctyactgtaatag

SEQ ID NO: 15436 - DNA, 21 bp, Homo sapiens
ctgctaattcytcatgtacct

SEQ ID NO: 15437 - DNA, 21 bp, Homo sapiens
tggcagacatyagagaggacc

SEQ ID NO: 15438 - DNA, 21 bp, Homo sapiens
tgacctaaacwggtttgggat

SEQ ID NO: 15439 - DNA, 21 bp, Homo sapiens
gctcaaagatrttaagatgtt

SEQ ID NO: 15440 - DNA, 21 bp, Homo sapiens
gctagggcctstcttcttgcc

SEQ ID NO: 15441 - DNA, 21 bp, Homo sapiens
attctacctgytcctttttat

SEQ ID NO: 15442 - DNA, 21 bp, Homo sapiens
ctctgttcccrtaacaaccct

SEQ ID NO: 15443 - DNA, 21 bp, Homo sapiens
accaaatagcyttatgcacct

SEQ ID NO: 15444 - DNA, 21 bp, Homo sapiens
tggcaaatagkttcactttca

SEQ ID NO: 15445 - DNA, 21 bp, Homo sapiens
ggggtgctccyttgaatcaca

SEQ ID NO: 15446 - DNA, 21 bp, Homo sapiens
tccctgtaacrtgagtttgac

SEQ ID NO: 15447 - DNA, 21 bp, Homo sapiens
atctttgttcrcttcccagga

SEQ ID NO: 15448 - DNA, 21 bp, Homo sapiens
aataaccaacstttgttgcat

SEQ ID NO: 15449 - DNA, 21 bp, Homo sapiens
ttcattagatyccactcactc

SEQ ID NO: 15450 - DNA, 21 bp, Homo sapiens
agcaagttgcrttgacttatt

SEQ ID NO: 15451 - DNA, 21 bp, Homo sapiens
tggcctcattrgagggaagaa

SEQ ID NO: 15452 - DNA, 21 bp, Homo sapiens
agtgaaagtayaccagtaaga

SEQ ID NO: 15453 - DNA, 21 bp, Homo sapiens
tcctcaggccrttagctaaat

SEQ ID NO: 15454 - DNA, 21 bp, Homo sapiens
aaggactcaaytcagaaacag

SEQ ID NO: 15455 - DNA, 21 bp, Homo sapiens
gatttgggccrcctgtccctc

SEQ ID NO: 15456 - DNA, 21 bp, Homo sapiens
aagaggaacayggaggtacag

SEQ ID NO: 15457 - DNA, 21 bp, Homo sapiens
ggaaagcaagyggccttatct

SEQ ID NO: 15458 - DNA, 21 bp, Homo sapiens
tgtgagctcayacacgttact

SEQ ID NO: 15459 - DNA, 21 bp, Homo sapiens
tcatccatagyatagcctcag

SEQ ID NO: 15460 - DNA, 21 bp, Homo sapiens
tcgtgagcagraatgatcaca

SEQ ID NO: 15461 - DNA, 21 bp, Homo sapiens
ggcacagacarggaacacaat

SEQ ID NO: 15462 - DNA, 21 bp, Homo sapiens
acatacagtcmtcaccaccag

SEQ ID NO: 15463 - DNA, 21 bp, Homo sapiens
aatagatgcaygtcttagttc

SEQ ID NO: 15464 - DNA, 21 bp, Homo sapiens
gatgttaagcrtcagaacggc

SEQ ID NO: 15465 - DNA, 21 bp, Homo sapiens
ctagacccagwgcttcccaac

SEQ ID NO: 15466 - DNA, 21 bp, Homo sapiens
tgggaacttasatgccttccc

SEQ ID NO: 15467 - DNA, 21 bp, Homo sapiens
tcaatattcarggagttttaa

SEQ ID NO: 15468 - DNA, 21 bp, Homo sapiens
atccaggaacktttggtccaa

SEQ ID NO: 15469 - DNA, 21 bp, Homo sapiens
gattcaactartactttgtgc

SEQ ID NO: 15470 - DNA, 21 bp, Homo sapiens
tttaaaatttrtgtgtgtttg

SEQ ID NO: 15471 - DNA, 21 bp, Homo sapiens
tagtttcggargagaggtaga

SEQ ID NO: 15472 - DNA, 21 bp, Homo sapiens
taatgcattcrtcgtaataca

SEQ ID NO: 15473 - DNA, 21 bp, Homo sapiens
atttttgtaawgtcctttaaa

SEQ ID NO: 15474 - DNA, 21 bp, Homo sapiens
tctacttttcrtcttgttctt

SEQ ID NO: 15475 - DNA, 21 bp, Homo sapiens
ttaatttcatstccctctcac

SEQ ID NO: 15476 - DNA, 21 bp, Homo sapiens
aaccttggcartctcaaaaat

SEQ ID NO: 15477 - DNA, 21 bp, Homo sapiens
cctgttgtctytgcagaagga

SEQ ID NO: 15478 - DNA, 21 bp, Homo sapiens
aaactatacgraaatataaca

SEQ ID NO: 15479 - DNA, 21 bp, Homo sapiens
gtgacaagccmtgcattgatt

SEQ ID NO: 15480 - DNA, 21 bp, Homo sapiens
tccacttgccyagggtaatag

SEQ ID NO: 15481 - DNA, 21 bp, Homo sapiens
attagcattastcatattcat

SEQ ID NO: 15482 - DNA, 21 bp, Homo sapiens
tttaatgtctrtgtaattttt

SEQ ID NO: 15483 - DNA, 21 bp, Homo sapiens
gtgtgagatartagtagttac

SEQ ID NO: 15484 - DNA, 21 bp, Homo sapiens
aacattgtatsagaagtagcc

SEQ ID NO: 15485 - DNA, 21 bp, Homo sapiens
attgtgcccaygaagtggact

SEQ ID NO: 15486 - DNA, 21 bp, Homo sapiens
agtaactactmcttcctcttt

SEQ ID NO: 15487 - DNA, 21 bp, Homo sapiens
ttctaagccaktctttgaatc

SEQ ID NO: 15488 - DNA, 21 bp, Homo sapiens
ttgggctactwattaagaggt

SEQ ID NO: 15489 - DNA, 21 bp, Homo sapiens
accaaaaatgrccttacttag

SEQ ID NO: 15490 - DNA, 21 bp, Homo sapiens
gaccctgaacyctctatggga

SEQ ID NO: 15491 - DNA, 21 bp, Homo sapiens
ctcaggaagaygaagctcaaa

SEQ ID NO: 15492 - DNA, 21 bp, Homo sapiens
aggacatatcwccattgtgca

SEQ ID NO: 15493 - DNA, 21 bp, Homo sapiens
cacatccattyggccaaagtg

SEQ ID NO: 15494 - DNA, 21 bp, Homo sapiens
tccccagggtstctcagtttt

SEQ ID NO: 15495 - DNA, 21 bp, Homo sapiens
acaagcgacasgcccccaaat

SEQ ID NO: 15496 - DNA, 21 bp, Homo sapiens
aaatttttgtyataatgtggt

SEQ ID NO: 15497 - DNA, 21 bp, Homo sapiens
gtgtccatccyggttctagcc

SEQ ID NO: 15498 - DNA, 21 bp, Homo sapiens
atctctttggwatctgtgcat

SEQ ID NO: 15499 - DNA, 21 bp, Homo sapiens
cctaatctatytacatttaat

SEQ ID NO: 15500 - DNA, 21 bp, Homo sapiens
tctctcctgcmtctgagctct

SEQ ID NO: 15501 - DNA, 21 bp, Homo sapiens
ggtgtcagagrtgtcaatgca

SEQ ID NO: 15502 - DNA, 21 bp, Homo sapiens
actatttttayataatttcag

SEQ ID NO: 15503 - DNA, 21 bp, Homo sapiens
tgattgcttcwtgtcgttgga

SEQ ID NO: 15504 - DNA, 21 bp, Homo sapiens
tgactgtgcgrtaacttaaag

SEQ ID NO: 15505 - DNA, 21 bp, Homo sapiens
tttcccctggmactttcattt

SEQ ID NO: 15506 - DNA, 21 bp, Homo sapiens
aacctgtcagrgaatacaata

SEQ ID NO: 15507 - DNA, 21 bp, Homo sapiens
atgatgtgaamtgcccagtgg

SEQ ID NO: 15508 - DNA, 21 bp, Homo sapiens
cgggcaccagytcacacgctc

SEQ ID NO: 15509 - DNA, 21 bp, Homo sapiens
gccaatgaggrattttagagc

SEQ ID NO: 15510 - DNA, 21 bp, Homo sapiens
agaaccagtarggtgtagttc

SEQ ID NO: 15511 - DNA, 21 bp, Homo sapiens
tttctcggccrtcttagctgt

SEQ ID NO: 15512 - DNA, 21 bp, Homo sapiens
tgataatccargaagtaaatt

SEQ ID NO: 15513 - DNA, 21 bp, Homo sapiens
gtcagttaacrgcatcacagg

SEQ ID NO: 15514 - DNA, 21 bp, Homo sapiens
tgggaaaagaygctggccttt

SEQ ID NO: 15515 - DNA, 21 bp, Homo sapiens
tttgattaagygagccaggct

SEQ ID NO: 15516 - DNA, 21 bp, Homo sapiens
cagttctctgyggcctgtcct

SEQ ID NO: 15517 - DNA, 21 bp, Homo sapiens
cttaccataarccatcaagct

SEQ ID NO: 15518 - DNA, 21 bp, Homo sapiens
tcagtgcctarttgtgttata

SEQ ID NO: 15519 - DNA, 21 bp, Homo sapiens
ttgggttgaasttctaagctg

SEQ ID NO: 15520 - DNA, 21 bp, Homo sapiens
gtgtttaataytcactggcta

SEQ ID NO: 15521 - DNA, 21 bp, Homo sapiens
ttctttctgaygccaaactcc

SEQ ID NO: 15522 - DNA, 21 bp, Homo sapiens
acttccttttytcactgacaa

SEQ ID NO: 15523 - DNA, 21 bp, Homo sapiens
gacaatcctgwtggtgccact

SEQ ID NO: 15524 - DNA, 21 bp, Homo sapiens
catgaaaaagwgcaaaaaatt

SEQ ID NO: 15525 - DNA, 21 bp, Homo sapiens
ccttacctgaragcctgaatg

SEQ ID NO: 15526 - DNA, 21 bp, Homo sapiens
ttagagaaaasttaagatgag

SEQ ID NO: 15527 - DNA, 21 bp, Homo sapiens
ttattcctgckgccagagctg

SEQ ID NO: 15528 - DNA, 21 bp, Homo sapiens
taattccaggyggcatactaa

SEQ ID NO: 15529 - DNA, 21 bp, Homo sapiens
ctggagagccrcttgagagta

SEQ ID NO: 15530 - DNA, 21 bp, Homo sapiens
cattctagccyaccccatgaa

SEQ ID NO: 15531 - DNA, 21 bp, Homo sapiens
agaagaaagartgatcctgtt

SEQ ID NO: 15532 - DNA, 21 bp, Homo sapiens
aggaatttccmggcttctcat

SEQ ID NO: 15533 - DNA, 21 bp, Homo sapiens
aatactattawtaagttgatc

SEQ ID NO: 15534 - DNA, 21 bp, Homo sapiens
ggagatgtcawtgtcagacct

SEQ ID NO: 15535 - DNA, 21 bp, Homo sapiens
aagaatgttgmcactattact

SEQ ID NO: 15536 - DNA, 21 bp, Homo sapiens
gctgatttggstgacaacagc

SEQ ID NO: 15537 - DNA, 21 bp, Homo sapiens
aaacctacccrgagagctatt

SEQ ID NO: 15538 - DNA, 21 bp, Homo sapiens
caggagatgargcagatccaa

SEQ ID NO: 15539 - DNA, 21 bp, Homo sapiens
ttatctctaaygctctttttc

SEQ ID NO: 15540 - DNA, 21 bp, Homo sapiens
gagtaggattmgtcaaattag

SEQ ID NO: 15541 - DNA, 21 bp, Homo sapiens
cctaagctttyaagtttgaca

SEQ ID NO: 15542 - DNA, 21 bp, Homo sapiens
ttcagaaagaygacggtaatt

SEQ ID NO: 15543 - DNA, 21 bp, Homo sapiens
ggaatggaagkcatcattggg

SEQ ID NO: 15544 - DNA, 21 bp, Homo sapiens
cttaaaatagyaaagtcctgc

SEQ ID NO: 15545 - DNA, 21 bp, Homo sapiens
aaaagaagtartagcaaacac

SEQ ID NO: 15546 - DNA, 21 bp, Homo sapiens
gactcagcccrttcctctctc

SEQ ID NO: 15547 - DNA, 21 bp, Homo sapiens
ttccatctgawcacacgatga

SEQ ID NO: 15548 - DNA, 21 bp, Homo sapiens
tgatcattatytccatagaag

SEQ ID NO: 15549 - DNA, 21 bp, Homo sapiens
aaattcaagaygtctggattt

SEQ ID NO: 15550 - DNA, 21 bp, Homo sapiens
ccagattaagyaagctgtctg

SEQ ID NO: 15551 - DNA, 21 bp, Homo sapiens
ttgtacattcygctttaaaac

SEQ ID NO: 15552 - DNA, 21 bp, Homo sapiens
aacatgctggkagtgattttc

SEQ ID NO: 15553 - DNA, 21 bp, Homo sapiens
ccattcatttkacacgcagcg

SEQ ID NO: 15554 - DNA, 21 bp, Homo sapiens
tgtcaaaaccraaggaaacaa

SEQ ID NO: 15555 - DNA, 21 bp, Homo sapiens
cataaaatagytgccaaacag

SEQ ID NO: 15556 - DNA, 21 bp, Homo sapiens
aaaactaaccrtatttcctca

SEQ ID NO: 15557 - DNA, 21 bp, Homo sapiens
aataacacacycagtacaggc

SEQ ID NO: 15558 - DNA, 21 bp, Homo sapiens
ctccaactcartattgtcctt

SEQ ID NO: 15559 - DNA, 21 bp, Homo sapiens
agtcaggtgaraaaggacgtg

SEQ ID NO: 15560 - DNA, 21 bp, Homo sapiens
cccaagctttytttctctatc

SEQ ID NO: 15561 - DNA, 21 bp, Homo sapiens
cctcgtttaawcctggcctca

SEQ ID NO: 15562 - DNA, 21 bp, Homo sapiens
ccttcaccaaygcaatctaca

SEQ ID NO: 15563 - DNA, 21 bp, Homo sapiens
cttccctcctytccttccttt

SEQ ID NO: 15564 - DNA, 21 bp, Homo sapiens
acaatttaggmtgggctggga

SEQ ID NO: 15565 - DNA, 21 bp, Homo sapiens
agtagaaaatyatctagagtg

SEQ ID NO: 15566 - DNA, 21 bp, Homo sapiens
ggtctctgatkggcttatgta

SEQ ID NO: 15567 - DNA, 21 bp, Homo sapiens
acaatctaaaygctctcaaat

SEQ ID NO: 15568 - DNA, 21 bp, Homo sapiens
tctcttaaggyctaaccaaca

SEQ ID NO: 15569 - DNA, 21 bp, Homo sapiens
gaagaccataygagatctgaa

SEQ ID NO: 15570 - DNA, 21 bp, Homo sapiens
gaaacagttgstagtccaaaa

SEQ ID NO: 15571 - DNA, 21 bp, Homo sapiens
taactaacttytcaggctgga

SEQ ID NO: 15572 - DNA, 21 bp, Homo sapiens
catctcagtgrtaaccatata

SEQ ID NO: 15573 - DNA, 21 bp, Homo sapiens
gtggtttaagrtaatgactag

SEQ ID NO: 15574 - DNA, 21 bp, Homo sapiens
tcggattgaargatgcaaagt

SEQ ID NO: 15575 - DNA, 21 bp, Homo sapiens
ctttatgtctkaatttcctca

SEQ ID NO: 15576 - DNA, 21 bp, Homo sapiens
tatgtgatgayagtaagcaag

SEQ ID NO: 15577 - DNA, 21 bp, Homo sapiens
acaaaaatccraatctatatt

SEQ ID NO: 15578 - DNA, 21 bp, Homo sapiens
agcataagagrccagaaagta

SEQ ID NO: 15579 - DNA, 21 bp, Homo sapiens
attaaggcctytgttaattgc

SEQ ID NO: 15580 - DNA, 21 bp, Homo sapiens
cttgaagtacmggcactttct

SEQ ID NO: 15581 - DNA, 21 bp, Homo sapiens
aatcagtgacytgaccagcca

SEQ ID NO: 15582 - DNA, 21 bp, Homo sapiens
tgcatgctagraaataaaacg

SEQ ID NO: 15583 - DNA, 21 bp, Homo sapiens
cggatgtcaastgggccctgc

SEQ ID NO: 15584 - DNA, 21 bp, Homo sapiens
gcaataaatgrtggttcagct

SEQ ID NO: 15585 - DNA, 21 bp, Homo sapiens
gcctccatcarttactacctt

SEQ ID NO: 15586 - DNA, 21 bp, Homo sapiens
ctatatgctartgaaatcctt

SEQ ID NO: 15587 - DNA, 21 bp, Homo sapiens
ttcagtttccyctagatgtct

SEQ ID NO: 15588 - DNA, 21 bp, Homo sapiens
cggtttcctcrcacaggtctc

SEQ ID NO: 15589 - DNA, 21 bp, Homo sapiens
aagtgcatctrtggcttgtca

SEQ ID NO: 15590 - DNA, 21 bp, Homo sapiens
agagaggtgtyggtgccctct

SEQ ID NO: 15591 - DNA, 21 bp, Homo sapiens
gctggaatgcrcttatcagaa

SEQ ID NO: 15592 - DNA, 21 bp, Homo sapiens
ggtgggcagaygttctggatg

SEQ ID NO: 15593 - DNA, 21 bp, Homo sapiens
cttggtgggtrgagcagagat

SEQ ID NO: 15594 - DNA, 21 bp, Homo sapiens
ggctgtgatcygtggtggaat

SEQ ID NO: 15595 - DNA, 21 bp, Homo sapiens
agctaagtgcrcggtaaggga

SEQ ID NO: 15596 - DNA, 21 bp, Homo sapiens
cctctggtcaygttctgatgt

SEQ ID NO: 15597 - DNA, 21 bp, Homo sapiens
tgataagcctwatccctcaca

SEQ ID NO: 15598 - DNA, 21 bp, Homo sapiens
accattgtcaratccctttcc

SEQ ID NO: 15599 - DNA, 21 bp, Homo sapiens
gtgtagtgcastggttcagag

SEQ ID NO: 15600 - DNA, 21 bp, Homo sapiens
gactatcaccrtccaaaactc

SEQ ID NO: 15601 - DNA, 21 bp, Homo sapiens
gtggcccgcgrtctggctgtt

SEQ ID NO: 15602 - DNA, 21 bp, Homo sapiens
tgagccttcamaaagcccaac

SEQ ID NO: 15603 - DNA, 21 bp, Homo sapiens
ggactggaggsacttcatgac

SEQ ID NO: 15604 - DNA, 21 bp, Homo sapiens
ctgagggccayagtagggaca

SEQ ID NO: 15605 - DNA, 21 bp, Homo sapiens
actgggagggrtgtgttgaga

SEQ ID NO: 15606 - DNA, 21 bp, Homo sapiens
aagtccttaaraaaactaaga

SEQ ID NO: 15607 - DNA, 21 bp, Homo sapiens
ttcaagctaawctgtgtggtg

SEQ ID NO: 15608 - DNA, 21 bp, Homo sapiens
cccttagaatrtaagaatata

SEQ ID NO: 15609 - DNA, 21 bp, Homo sapiens
tcgagcgaaamcctcctgcca

SEQ ID NO: 15610 - DNA, 21 bp, Homo sapiens
ttcatattgayttgtttggtt

SEQ ID NO: 15611 - DNA, 21 bp, Homo sapiens
taaccaccaaygagaacagac

SEQ ID NO: 15612 - DNA, 21 bp, Homo sapiens
ctctggcccawcagttcagga

SEQ ID NO: 15613 - DNA, 21 bp, Homo sapiens
tgtgctaaggrgaattatata

SEQ ID NO: 15614 - DNA, 21 bp, Homo sapiens
gggtagaagtkgacaggaatc

SEQ ID NO: 15615 - DNA, 21 bp, Homo sapiens
tggccgtaagsagggtctgtc

SEQ ID NO: 15616 - DNA, 21 bp, Homo sapiens
gctcttgagawttagcccctg

SEQ ID NO: 15617 - DNA, 21 bp, Homo sapiens
ggtttgggaakgtgaagagtt

SEQ ID NO: 15618 - DNA, 21 bp, Homo sapiens
gcacaaagagytgcaatctaa

SEQ ID NO: 15619 - DNA, 21 bp, Homo sapiens
cacgttgagaygtttcagatg

SEQ ID NO: 15620 - DNA, 21 bp, Homo sapiens
ttctcgatacraagtcccagg

SEQ ID NO: 15621 - DNA, 21 bp, Homo sapiens
ctgtttaacgkatttatggcc

SEQ ID NO: 15622 - DNA, 21 bp, Homo sapiens
gtatcttgtasttatgttccc

SEQ ID NO: 15623 - DNA, 21 bp, Homo sapiens
cccaaaaatgmaccctggaca

SEQ ID NO: 15624 - DNA, 21 bp, Homo sapiens
ggacagcaccyttctgattcc

SEQ ID NO: 15625 - DNA, 21 bp, Homo sapiens
cattttcctcracatgtggct

SEQ ID NO: 15626 - DNA, 21 bp, Homo sapiens
cctgagatgtrcacacatgcg

SEQ ID NO: 15627 - DNA, 21 bp, Homo sapiens
ttgaaatgagytaattcaagt

SEQ ID NO: 15628 - DNA, 21 bp, Homo sapiens
cggtagcatasaagaccgttc

SEQ ID NO: 15629 - DNA, 21 bp, Homo sapiens
tagtagctgcmaccactccag

SEQ ID NO: 15630 - DNA, 21 bp, Homo sapiens
ccaagctactsggagccacac

SEQ ID NO: 15631 - DNA, 21 bp, Homo sapiens
cctcccaccaytaaataacca

SEQ ID NO: 15632 - DNA, 21 bp, Homo sapiens
gaaaagatagycatagattaa

SEQ ID NO: 15633 - DNA, 21 bp, Homo sapiens
aatctaattcyaaccttactc

SEQ ID NO: 15634 - DNA, 21 bp, Homo sapiens
atgacgaaaamaaacacaaat

SEQ ID NO: 15635 - DNA, 21 bp, Homo sapiens
accactctgcragaaaaaaat

SEQ ID NO: 15636 - DNA, 21 bp, Homo sapiens
caagccttaamgggcatattg

SEQ ID NO: 15637 - DNA, 21 bp, Homo sapiens
tgtcagcaaayggagctagtc

SEQ ID NO: 15638 - DNA, 21 bp, Homo sapiens
atttaaaaagraatttcataa

SEQ ID NO: 15639 - DNA, 21 bp, Homo sapiens
tcattaagccwagaacaatgt

SEQ ID NO: 15640 - DNA, 21 bp, Homo sapiens
gtgttacaacytcgacttcct

SEQ ID NO: 15641 - DNA, 21 bp, Homo sapiens
catagactccygccgttcagt

SEQ ID NO: 15642 - DNA, 21 bp, Homo sapiens
ccaaatagtgycatgcggtaa

SEQ ID NO: 15643 - DNA, 21 bp, Homo sapiens
ccaggagactrtcttttggtc

SEQ ID NO: 15644 - DNA, 21 bp, Homo sapiens
agttgcagggwgtgttgctag

SEQ ID NO: 15645 - DNA, 21 bp, Homo sapiens
aaaactaccasaatgaaattt

SEQ ID NO: 15646 - DNA, 21 bp, Homo sapiens
atatttttctrgatttggatt

SEQ ID NO: 15647 - DNA, 21 bp, Homo sapiens
tgcaaatgggmaaaatcaata

SEQ ID NO: 15648 - DNA, 21 bp, Homo sapiens
tcctacagtcyttgcatctaa

SEQ ID NO: 15649 - DNA, 21 bp, Homo sapiens
ctatgactgcytgtgagaatt

SEQ ID NO: 15650 - DNA, 21 bp, Homo sapiens
ttattactctrtatcactggg

SEQ ID NO: 15651 - DNA, 21 bp, Homo sapiens
tctgctttttscccgaggccc

SEQ ID NO: 15652 - DNA, 21 bp, Homo sapiens
atgcttccatraagagctatt

SEQ ID NO: 15653 - DNA, 21 bp, Homo sapiens
tggagcacacwttctacttgt

SEQ ID NO: 15654 - DNA, 21 bp, Homo sapiens
gctggcttctmccttagagag

SEQ ID NO: 15655 - DNA, 21 bp, Homo sapiens
aaaatttaaayggtgggtaac

SEQ ID NO: 15656 - DNA, 21 bp, Homo sapiens
acaactcatcrctagacgtag

SEQ ID NO: 15657 - DNA, 21 bp, Homo sapiens
catcctcttawctggtggctt

SEQ ID NO: 15658 - DNA, 21 bp, Homo sapiens
gggtctattcsttgtcatcac

SEQ ID NO: 15659 - DNA, 21 bp, Homo sapiens
aagatacagcraggccagctt

SEQ ID NO: 15660 - DNA, 21 bp, Homo sapiens
ccatctctgcrttccctgaac

SEQ ID NO: 15661 - DNA, 21 bp, Homo sapiens
acagtgcttcygggaattttg

SEQ ID NO: 15662 - DNA, 21 bp, Homo sapiens
tttgatatatyctcatgaaat

SEQ ID NO: 15663 - DNA, 21 bp, Homo sapiens
ttaaaagatcstcaaatagac

SEQ ID NO: 15664 - DNA, 21 bp, Homo sapiens
ctaaagtaccrtccaaatgca

SEQ ID NO: 15665 - DNA, 21 bp, Homo sapiens
ctcacagttgycacctatttg

SEQ ID NO: 15666 - DNA, 21 bp, Homo sapiens
atgtaaagacwcattttgtaa

SEQ ID NO: 15667 - DNA, 21 bp, Homo sapiens
acttatggatmcccaggaact

SEQ ID NO: 15668 - DNA, 21 bp, Homo sapiens
tcaaatgagaygagtgaaaag

SEQ ID NO: 15669 - DNA, 21 bp, Homo sapiens
gtctttgccasaattgggcag

SEQ ID NO: 15670 - DNA, 21 bp, Homo sapiens
gccatcgtacrgtaatgggca

SEQ ID NO: 15671 - DNA, 21 bp, Homo sapiens
tccaccaactyttctccagtt

SEQ ID NO: 15672 - DNA, 21 bp, Homo sapiens
aagaaaatatmaagcacagtg

SEQ ID NO: 15673 - DNA, 21 bp, Homo sapiens
tgtctagtcgrtaacatgaac

SEQ ID NO: 15674 - DNA, 21 bp, Homo sapiens
gagaagccgcrcaggccctgc

SEQ ID NO: 15675 - DNA, 21 bp, Homo sapiens
taatagttgtsttatagtgtt

SEQ ID NO: 15676 - DNA, 21 bp, Homo sapiens
gcaccttggcrgaatcatgtg

SEQ ID NO: 15677 - DNA, 21 bp, Homo sapiens
tattggcaatrccagcctctc

SEQ ID NO: 15678 - DNA, 21 bp, Homo sapiens
gtgtttgttcmgttttcactg

SEQ ID NO: 15679 - DNA, 21 bp, Homo sapiens
acccttcaccmtcattaacag

SEQ ID NO: 15680 - DNA, 21 bp, Homo sapiens
ttccctgtgartgtgtataga

SEQ ID NO: 15681 - DNA, 21 bp, Homo sapiens
ttatgatgatwtataaaagac

SEQ ID NO: 15682 - DNA, 21 bp, Homo sapiens
gcaaagctctrtagtgtttct

SEQ ID NO: 15683 - DNA, 21 bp, Homo sapiens
aaatatatttygtttaatcag

SEQ ID NO: 15684 - DNA, 21 bp, Homo sapiens
aaaaattaccktgaccatcaa

SEQ ID NO: 15685 - DNA, 21 bp, Homo sapiens
ataccaaaaartattcagaga

SEQ ID NO: 15686 - DNA, 21 bp, Homo sapiens
aaagggcttartgactaatat

SEQ ID NO: 15687 - DNA, 21 bp, Homo sapiens
tatccctctgsgttgcagaat

SEQ ID NO: 15688 - DNA, 21 bp, Homo sapiens
cagagatactrtgtgcaaaat

SEQ ID NO: 15689 - DNA, 21 bp, Homo sapiens
gtatgaggcawctaattgctt

SEQ ID NO: 15690 - DNA, 21 bp, Homo sapiens
ccatccttcaytgcaacgcgc

SEQ ID NO: 15691 - DNA, 21 bp, Homo sapiens
ggaaactatcyacttgtcact

SEQ ID NO: 15692 - DNA, 21 bp, Homo sapiens
ttaagcagtgwccttactgca

SEQ ID NO: 15693 - DNA, 21 bp, Homo sapiens
atatctcaatrgtgatggaca

SEQ ID NO: 15694 - DNA, 21 bp, Homo sapiens
catttcatctrcaaagtaata

SEQ ID NO: 15695 - DNA, 21 bp, Homo sapiens
gaaaattttcrtcaaggaaat

SEQ ID NO: 15696 - DNA, 21 bp, Homo sapiens
ggatgtttggkttaggaaatt

SEQ ID NO: 15697 - DNA, 21 bp, Homo sapiens
acatttggtasctgggccact

SEQ ID NO: 15698 - DNA, 21 bp, Homo sapiens
tgactgtactrtaattttctt

SEQ ID NO: 15699 - DNA, 21 bp, Homo sapiens
acaatgtgtamaatgagccca

SEQ ID NO: 15700 - DNA, 21 bp, Homo sapiens
tggtatttatsatagggaaat

SEQ ID NO: 15701 - DNA, 21 bp, Homo sapiens
gaccaaaggcrtttatcaaag

SEQ ID NO: 15702 - DNA, 21 bp, Homo sapiens
tgagcagtgayggaaacaagg

SEQ ID NO: 15703 - DNA, 21 bp, Homo sapiens
tatgtgagaaygattgtgagg

SEQ ID NO: 15704 - DNA, 21 bp, Homo sapiens
ctttattagcrcagaaacttg

SEQ ID NO: 15705 - DNA, 21 bp, Homo sapiens
ctgtctttagytagcagggtg

SEQ ID NO: 15706 - DNA, 21 bp, Homo sapiens
catcttgggtsattttcctcc

SEQ ID NO: 15707 - DNA, 21 bp, Homo sapiens
taggagccgtkgcagaggtgt

SEQ ID NO: 15708 - DNA, 21 bp, Homo sapiens
acaatgtgtcytgccaccaag

SEQ ID NO: 15709 - DNA, 21 bp, Homo sapiens
ttttcttggcmgaagaatgtg

SEQ ID NO: 15710 - DNA, 21 bp, Homo sapiens
gccttctgatyatcttgaaga

SEQ ID NO: 15711 - DNA, 21 bp, Homo sapiens
ggtttcatagrtgacaaggga

SEQ ID NO: 15712 - DNA, 21 bp, Homo sapiens
tgtaatttggsttatgaagct

SEQ ID NO: 15713 - DNA, 21 bp, Homo sapiens
tggctttgatycatgacccca

SEQ ID NO: 15714 - DNA, 21 bp, Homo sapiens
atacttttccrttcatagtgg

SEQ ID NO: 15715 - DNA, 21 bp, Homo sapiens
ttggtcatcamtgaaaaaggc

SEQ ID NO: 15716 - DNA, 21 bp, Homo sapiens
gagatgacaaygaaagaacag

SEQ ID NO: 15717 - DNA, 21 bp, Homo sapiens
aagcagactgytgattcaaga

SEQ ID NO: 15718 - DNA, 21 bp, Homo sapiens
atggaccaaartagccccagt

SEQ ID NO: 15719 - DNA, 21 bp, Homo sapiens
actaatgcctytttactgttc

SEQ ID NO: 15720 - DNA, 21 bp, Homo sapiens
attgtgacttsctggagggtg

SEQ ID NO: 15721 - DNA, 21 bp, Homo sapiens
tgtttcatgtrgtcctcagtg

SEQ ID NO: 15722 - DNA, 21 bp, Homo sapiens
ttgttttatcrtttggtgaga

SEQ ID NO: 15723 - DNA, 21 bp, Homo sapiens
ctttgaatccrccaaagattt

SEQ ID NO: 15724 - DNA, 21 bp, Homo sapiens
ccgctgggaayagcttgccct

SEQ ID NO: 15725 - DNA, 21 bp, Homo sapiens
gaaagtcatartttacaaagg

SEQ ID NO: 15726 - DNA, 21 bp, Homo sapiens
tcttgaccagktattcacttg

SEQ ID NO: 15727 - DNA, 21 bp, Homo sapiens
cccaaaattcrgaacttgaac

SEQ ID NO: 15728 - DNA, 21 bp, Homo sapiens
atgataaatawgtggcaattt

SEQ ID NO: 15729 - DNA, 21 bp, Homo sapiens
acggccaacaytagtttcaac

SEQ ID NO: 15730 - DNA, 21 bp, Homo sapiens
gttagaagacrttgccaagca

SEQ ID NO: 15731 - DNA, 21 bp, Homo sapiens
tgctcgaccayggaaacagct

SEQ ID NO: 15732 - DNA, 21 bp, Homo sapiens
acattgtagamagagttttgc

SEQ ID NO: 15733 - DNA, 21 bp, Homo sapiens
agttttgtctygtttttaaca

SEQ ID NO: 15734 - DNA, 21 bp, Homo sapiens
tccataggccrtaagaaattg

SEQ ID NO: 15735 - DNA, 21 bp, Homo sapiens
ccagcagatamattaaagcaa

SEQ ID NO: 15736 - DNA, 21 bp, Homo sapiens
tcttcaagggyttctgaaatg

SEQ ID NO: 15737 - DNA, 21 bp, Homo sapiens
tacatgaaacwttttgtacaa

SEQ ID NO: 15738 - DNA, 21 bp, Homo sapiens
cttcttggacytggataaact

SEQ ID NO: 15739 - DNA, 21 bp, Homo sapiens
ccaatttaggyacggtatttt

SEQ ID NO: 15740 - DNA, 21 bp, Homo sapiens
tggtcccctayttgtaaaatg

SEQ ID NO: 15741 - DNA, 21 bp, Homo sapiens
agcacactcamgttcttaata

SEQ ID NO: 15742 - DNA, 21 bp, Homo sapiens
tggggagtacrttttgcaagg

SEQ ID NO: 15743 - DNA, 21 bp, Homo sapiens
ataacatttcmttcatagaac

SEQ ID NO: 15744 - DNA, 21 bp, Homo sapiens
ttgtggcctgrcctcactctg

SEQ ID NO: 15745 - DNA, 21 bp, Homo sapiens
aaagtggaacrggctatcagt

SEQ ID NO: 15746 - DNA, 21 bp, Homo sapiens
caattaaacamtctttggaaa

SEQ ID NO: 15747 - DNA, 21 bp, Homo sapiens
attttaacacytgcatagcag

SEQ ID NO: 15748 - DNA, 21 bp, Homo sapiens
ccatgagctgmgataccacgg

SEQ ID NO: 15749 - DNA, 21 bp, Homo sapiens
atatctgggtrgtctttccca

SEQ ID NO: 15750 - DNA, 21 bp, Homo sapiens
gtctcagtccyttttttcctg

SEQ ID NO: 15751 - DNA, 21 bp, Homo sapiens
ctaggttcaawcccaggccca

SEQ ID NO: 15752 - DNA, 21 bp, Homo sapiens
tggcaccggtyggcaggaagc

SEQ ID NO: 15753 - DNA, 21 bp, Homo sapiens
agatgttcagyattatagaat

SEQ ID NO: 15754 - DNA, 21 bp, Homo sapiens
acaggatagtygttccctgtg

SEQ ID NO: 15755 - DNA, 21 bp, Homo sapiens
agaccttgagygtggactaga

SEQ ID NO: 15756 - DNA, 21 bp, Homo sapiens
ccattctcctmacctaaaatc

SEQ ID NO: 15757 - DNA, 21 bp, Homo sapiens
aaccaggattscatgctgcca

SEQ ID NO: 15758 - DNA, 21 bp, Homo sapiens
tgcaatacatrtgtatcaaga

SEQ ID NO: 15759 - DNA, 21 bp, Homo sapiens
aaaaaagcatyttgtgagcaa

SEQ ID NO: 15760 - DNA, 21 bp, Homo sapiens
tggaaaaatgmatcgactggg

SEQ ID NO: 15761 - DNA, 21 bp, Homo sapiens
tttttttcacrtattccccac

SEQ ID NO: 15762 - DNA, 21 bp, Homo sapiens
gcatcttcacrcaaccaggga

SEQ ID NO: 15763 - DNA, 21 bp, Homo sapiens
gtagcaagcasggcgaacgtg

SEQ ID NO: 15764 - DNA, 21 bp, Homo sapiens
gtaataatacrctcttcacag

SEQ ID NO: 15765 - DNA, 21 bp, Homo sapiens
atggtttctaygggaaaatgt

SEQ ID NO: 15766 - DNA, 21 bp, Homo sapiens
tgctatgaacytggctcaatt

SEQ ID NO: 15767 - DNA, 21 bp, Homo sapiens
tgcatccactytggctctcac

SEQ ID NO: 15768 - DNA, 21 bp, Homo sapiens
caatatacttwtatgtaattt

SEQ ID NO: 15769 - DNA, 21 bp, Homo sapiens
taactgaagtrttatttattt

SEQ ID NO: 15770 - DNA, 21 bp, Homo sapiens
tagctcaagakgatattaatg

SEQ ID NO: 15771 - DNA, 21 bp, Homo sapiens
gatgtttttaycagcagcttt

SEQ ID NO: 15772 - DNA, 21 bp, Homo sapiens
aaaccatcccygacttcgcca

SEQ ID NO: 15773 - DNA, 21 bp, Homo sapiens
tggggaggttktaggtacaca

SEQ ID NO: 15774 - DNA, 21 bp, Homo sapiens
attcatctgcyagacgtttgt

SEQ ID NO: 15775 - DNA, 21 bp, Homo sapiens
acagatatttyttaaagtgtt

SEQ ID NO: 15776 - DNA, 21 bp, Homo sapiens
tttttggtttyatgcttactt

SEQ ID NO: 15777 - DNA, 21 bp, Homo sapiens
gaacgtttctkgatgtattga

SEQ ID NO: 15778 - DNA, 21 bp, Homo sapiens
tgcaaaatgaycagagttata

SEQ ID NO: 15779 - DNA, 21 bp, Homo sapiens
cggagatatcraatctattga

SEQ ID NO: 15780 - DNA, 21 bp, Homo sapiens
gtgtttattasagcctgcatt

SEQ ID NO: 15781 - DNA, 21 bp, Homo sapiens
agcaatgcacrctcagctaag

SEQ ID NO: 15782 - DNA, 21 bp, Homo sapiens
atgcatcactrattatctttg

SEQ ID NO: 15783 - DNA, 21 bp, Homo sapiens
cttcctttacrtcaatggaac

SEQ ID NO: 15784 - DNA, 21 bp, Homo sapiens
gatatttatcygaattgctgt

SEQ ID NO: 15785 - DNA, 21 bp, Homo sapiens
gtgcagacatyaaagaaagaa

SEQ ID NO: 15786 - DNA, 21 bp, Homo sapiens
tagtcacttcwtcttgaccac

SEQ ID NO: 15787 - DNA, 21 bp, Homo sapiens
cacatgggatmcttaggagca

SEQ ID NO: 15788 - DNA, 21 bp, Homo sapiens
ttgatagtcartgctgtaagt

SEQ ID NO: 15789 - DNA, 21 bp, Homo sapiens
aggtccatgtkgccccctggt

SEQ ID NO: 15790 - DNA, 21 bp, Homo sapiens
tggtcattagwtgcacaaata

SEQ ID NO: 15791 - DNA, 21 bp, Homo sapiens
tctacaacagraaagttactt

SEQ ID NO: 15792 - DNA, 21 bp, Homo sapiens
tgtggaaatgygtaatggaaa

SEQ ID NO: 15793 - DNA, 21 bp, Homo sapiens
aagatatgtgytggcttagac

SEQ ID NO: 15794 - DNA, 21 bp, Homo sapiens
attcacatccrattgacaaga

SEQ ID NO: 15795 - DNA, 21 bp, Homo sapiens
ttctagcttcmgaatttttta

SEQ ID NO: 15796 - DNA, 21 bp, Homo sapiens
agtcaaaattmtctctaagat

SEQ ID NO: 15797 - DNA, 21 bp, Homo sapiens
gactatcagcygagatacttg

SEQ ID NO: 15798 - DNA, 21 bp, Homo sapiens
tgggaattttraatggaggaa

SEQ ID NO: 15799 - DNA, 21 bp, Homo sapiens
aggtaataggyagaagtgaga

SEQ ID NO: 15800 - DNA, 21 bp, Homo sapiens
caccactattkttaagcctta

SEQ ID NO: 15801 - DNA, 21 bp, Homo sapiens
cttagagttgwacttttgcca

SEQ ID NO: 15802 - DNA, 21 bp, Homo sapiens
tatcagatttrgctgactccg

SEQ ID NO: 15803 - DNA, 21 bp, Homo sapiens
tggatttcatrgcattttatg

SEQ ID NO: 15804 - DNA, 21 bp, Homo sapiens
cagaaaaataktgacacaagc

SEQ ID NO: 15805 - DNA, 21 bp, Homo sapiens
tttctgtgtgsagcattctct

SEQ ID NO: 15806 - DNA, 21 bp, Homo sapiens
tgctcatgaawctgaggaaca

SEQ ID NO: 15807 - DNA, 21 bp, Homo sapiens
atgaagtccaytgttgaaatt

SEQ ID NO: 15808 - DNA, 21 bp, Homo sapiens
cattgaattargttctgatga

SEQ ID NO: 15809 - DNA, 21 bp, Homo sapiens
aggatgcgatmaagtaatctc

SEQ ID NO: 15810 - DNA, 21 bp, Homo sapiens
caaacccgatktgatggaaaa

SEQ ID NO: 15811 - DNA, 21 bp, Homo sapiens
gaatttaaaaytagatccgtc

SEQ ID NO: 15812 - DNA, 21 bp, Homo sapiens
atttccaccaygaacatttcc

SEQ ID NO: 15813 - DNA, 21 bp, Homo sapiens
gttttaagatrcaaacaaaga

SEQ ID NO: 15814 - DNA, 21 bp, Homo sapiens
aagtgttggayccagaactta

SEQ ID NO: 15815 - DNA, 21 bp, Homo sapiens
cttttattaaraagttcgtta

SEQ ID NO: 15816 - DNA, 21 bp, Homo sapiens
caagagtgttyggtaagccat

SEQ ID NO: 15817 - DNA, 21 bp, Homo sapiens
gtcttttctgygcttgtgcac

SEQ ID NO: 15818 - DNA, 21 bp, Homo sapiens
aacctgatagytattggctag

SEQ ID NO: 15819 - DNA, 21 bp, Homo sapiens
tttcattgtaygctaccaaaa

SEQ ID NO: 15820 - DNA, 21 bp, Homo sapiens
tgaacttccckcatcagcaaa

SEQ ID NO: 15821 - DNA, 21 bp, Homo sapiens
gagcacatatrttttaaaaat

SEQ ID NO: 15822 - DNA, 21 bp, Homo sapiens
tgctgctctgrgaatgtgtgt

SEQ ID NO: 15823 - DNA, 21 bp, Homo sapiens
gcatttcctgycataaatctg

SEQ ID NO: 15824 - DNA, 21 bp, Homo sapiens
attagctggayggtggctata

SEQ ID NO: 15825 - DNA, 21 bp, Homo sapiens
ttttatatcaygtattttatt

SEQ ID NO: 15826 - DNA, 21 bp, Homo sapiens
cacaaattctragagtatagt

SEQ ID NO: 15827 - DNA, 21 bp, Homo sapiens
gggagaatctraattcatttt

SEQ ID NO: 15828 - DNA, 21 bp, Homo sapiens
ccaaacctgtyatgcagaata

SEQ ID NO: 15829 - DNA, 21 bp, Homo sapiens
tcttgcagatrgtaggcctaa

SEQ ID NO: 15830 - DNA, 21 bp, Homo sapiens
aaatatgactrttgtgtattt

SEQ ID NO: 15831 - DNA, 21 bp, Homo sapiens
ctaagttttcyggtcttatga

SEQ ID NO: 15832 - DNA, 21 bp, Homo sapiens
tacatttgtgrtactaattct

SEQ ID NO: 15833 - DNA, 21 bp, Homo sapiens
gccctcaatgycagctctatt

SEQ ID NO: 15834 - DNA, 21 bp, Homo sapiens
tagaatgctgkagaaaataga

SEQ ID NO: 15835 - DNA, 21 bp, Homo sapiens
ttttagccacyatccaaataa

SEQ ID NO: 15836 - DNA, 21 bp, Homo sapiens
caaggaatttsttcaaaaaaa

SEQ ID NO: 15837 - DNA, 21 bp, Homo sapiens
tttaagcttayatttacctca

SEQ ID NO: 15838 - DNA, 21 bp, Homo sapiens
aattttttttmcaaaagataa

SEQ ID NO: 15839 - DNA, 21 bp, Homo sapiens
ctagccccgawtaaatagtgc

SEQ ID NO: 15840 - DNA, 21 bp, Homo sapiens
aatccacaatyaatcactggc

SEQ ID NO: 15841 - DNA, 21 bp, Homo sapiens
atggcacctgmgagtacatag

SEQ ID NO: 15842 - DNA, 21 bp, Homo sapiens
tttgtatccaratgaattcca

SEQ ID NO: 15843 - DNA, 21 bp, Homo sapiens
attattattaytcagtaggtt

SEQ ID NO: 15844 - DNA, 21 bp, Homo sapiens
gtacactaggmtttgatgtct

SEQ ID NO: 15845 - DNA, 21 bp, Homo sapiens
ttaacaaatcrtctcatatat

SEQ ID NO: 15846 - DNA, 21 bp, Homo sapiens
ttggaaatctstctttgaatg

SEQ ID NO: 15847 - DNA, 21 bp, Homo sapiens
cattcattcaytcaaatacat

SEQ ID NO: 15848 - DNA, 21 bp, Homo sapiens
cagaagcctcyagcactagcc

SEQ ID NO: 15849 - DNA, 21 bp, Homo sapiens
gagttataggyattgattgta

SEQ ID NO: 15850 - DNA, 21 bp, Homo sapiens
gtagttttttmaaaaggaaaa

SEQ ID NO: 15851 - DNA, 21 bp, Homo sapiens
actgactttcmtcatgctgca

SEQ ID NO: 15852 - DNA, 21 bp, Homo sapiens
agtttaatatrtaccagtttt

SEQ ID NO: 15853 - DNA, 21 bp, Homo sapiens
gtggaagctgygggagcgaga

SEQ ID NO: 15854 - DNA, 21 bp, Homo sapiens
tggaatgtatmtacgcatatg

SEQ ID NO: 15855 - DNA, 21 bp, Homo sapiens
ctttcttaatrtttccattca

SEQ ID NO: 15856 - DNA, 21 bp, Homo sapiens
ctataaggtaycattggttcc

SEQ ID NO: 15857 - DNA, 21 bp, Homo sapiens
ataaatgcacktttgatcatc

SEQ ID NO: 15858 - DNA, 21 bp, Homo sapiens
tgtattcaatygcaagtaggt

SEQ ID NO: 15859 - DNA, 21 bp, Homo sapiens
acaacactgaytaaaaactgc

SEQ ID NO: 15860 - DNA, 21 bp, Homo sapiens
atcatcctgtygaaagggctc

SEQ ID NO: 15861 - DNA, 21 bp, Homo sapiens
ctcctaactgmagggttttat

SEQ ID NO: 15862 - DNA, 21 bp, Homo sapiens
agggtatttarctgcaggatt

SEQ ID NO: 15863 - DNA, 21 bp, Homo sapiens
aatggttttcwtcctgtttcc

SEQ ID NO: 15864 - DNA, 21 bp, Homo sapiens
atgattgtggwggaactggaa

SEQ ID NO: 15865 - DNA, 21 bp, Homo sapiens
ttgatttgatktttatgtccc

SEQ ID NO: 15866 - DNA, 21 bp, Homo sapiens
ttaggcatctrttgcaaagga

SEQ ID NO: 15867 - DNA, 21 bp, Homo sapiens
gaacccttatkgcatttgtgt

SEQ ID NO: 15868 - DNA, 21 bp, Homo sapiens
ggaaattatgyttttttattg

SEQ ID NO: 15869 - DNA, 21 bp, Homo sapiens
gtccccatgtrattctattcc

SEQ ID NO: 15870 - DNA, 21 bp, Homo sapiens
tatatatttcycactctttaa

SEQ ID NO: 15871 - DNA, 21 bp, Homo sapiens
gacactgggaratgtttcaaa

SEQ ID NO: 15872 - DNA, 21 bp, Homo sapiens
taatacatgcycaataaacat

SEQ ID NO: 15873 - DNA, 21 bp, Homo sapiens
atatcacttcwtaaatagcca

SEQ ID NO: 15874 - DNA, 21 bp, Homo sapiens
tataatgtttwtccttgtctt

SEQ ID NO: 15875 - DNA, 21 bp, Homo sapiens
ttgatgaaaaygtgaatagtt

SEQ ID NO: 15876 - DNA, 21 bp, Homo sapiens
atattaaagtrccaatcagct

SEQ ID NO: 15877 - DNA, 21 bp, Homo sapiens
tgcaaagaccygaggctctgt

SEQ ID NO: 15878 - DNA, 21 bp, Homo sapiens
gctctcatcaraaaaaggcct

SEQ ID NO: 15879 - DNA, 21 bp, Homo sapiens
tgaaatgtttyattatacaat

SEQ ID NO: 15880 - DNA, 21 bp, Homo sapiens
tgacttaaatkttttttgaat

SEQ ID NO: 15881 - DNA, 21 bp, Homo sapiens
agatcattatsgtttaatatt

SEQ ID NO: 15882 - DNA, 21 bp, Homo sapiens
accttaaaatkcctgattgtt

SEQ ID NO: 15883 - DNA, 21 bp, Homo sapiens
ataggcattgrcaagagaaag

SEQ ID NO: 15884 - DNA, 21 bp, Homo sapiens
tacaaagagasgaatggaaac

SEQ ID NO: 15885 - DNA, 21 bp, Homo sapiens
atctgcactgmaaataaccat

SEQ ID NO: 15886 - DNA, 21 bp, Homo sapiens
aaaaatacacrcaaatatatg

SEQ ID NO: 15887 - DNA, 21 bp, Homo sapiens
aaggttactcractcaagcta

SEQ ID NO: 15888 - DNA, 21 bp, Homo sapiens
ctcataagttwaccatgctag

SEQ ID NO: 15889 - DNA, 21 bp, Homo sapiens
agagtccttgygctcaacctc

SEQ ID NO: 15890 - DNA, 21 bp, Homo sapiens
gcaaatgttartcagatggtt

SEQ ID NO: 15891 - DNA, 21 bp, Homo sapiens
actttttctgygagttaggaa

SEQ ID NO: 15892 - DNA, 21 bp, Homo sapiens
ccagcaagctsatccatagag

SEQ ID NO: 15893 - DNA, 21 bp, Homo sapiens
gccactgatayccccagttct

SEQ ID NO: 15894 - DNA, 21 bp, Homo sapiens
tatgccagctyttgaatcata

SEQ ID NO: 15895 - DNA, 21 bp, Homo sapiens
aaagtcatgtraagtcctttc

SEQ ID NO: 15896 - DNA, 21 bp, Homo sapiens
ctcaatgcacyatgggaaact

SEQ ID NO: 15897 - DNA, 21 bp, Homo sapiens
agatgcaaccrtttctctgtg

SEQ ID NO: 15898 - DNA, 21 bp, Homo sapiens
agtttcaaatmgatacagcac

SEQ ID NO: 15899 - DNA, 21 bp, Homo sapiens
gtatgaataarctgaaatcac

SEQ ID NO: 15900 - DNA, 21 bp, Homo sapiens
catcccgaaartctcaaatct

SEQ ID NO: 15901 - DNA, 21 bp, Homo sapiens
ccaggacaggrctaaagggat

SEQ ID NO: 15902 - DNA, 21 bp, Homo sapiens
gaaagatgatsgaggaatgcc

SEQ ID NO: 15903 - DNA, 21 bp, Homo sapiens
ctccaatgtaygacatccctt

SEQ ID NO: 15904 - DNA, 21 bp, Homo sapiens
tggaagagaasaggctactat

SEQ ID NO: 15905 - DNA, 21 bp, Homo sapiens
agttggatttkatgagtccca

SEQ ID NO: 15906 - DNA, 21 bp, Homo sapiens
gatttacatargactttccag

SEQ ID NO: 15907 - DNA, 21 bp, Homo sapiens
cacctctctaygggattgttg

SEQ ID NO: 15908 - DNA, 21 bp, Homo sapiens
cattcggaacygcccagtcct

SEQ ID NO: 15909 - DNA, 21 bp, Homo sapiens
acagttgccaycatacctcag

SEQ ID NO: 15910 - DNA, 21 bp, Homo sapiens
taaacttcctygtaacgcaaa

SEQ ID NO: 15911 - DNA, 21 bp, Homo sapiens
tctgtgcgtayctgcaaacag

SEQ ID NO: 15912 - DNA, 21 bp, Homo sapiens
ttcatgtagartcaattgtga

SEQ ID NO: 15913 - DNA, 21 bp, Homo sapiens
caacgcggccrtcgccttcaa

SEQ ID NO: 15914 - DNA, 21 bp, Homo sapiens
tatatttatcrttctgtttca

SEQ ID NO: 15915 - DNA, 21 bp, Homo sapiens
cagcaacaagsattgtgacag

SEQ ID NO: 15916 - DNA, 21 bp, Homo sapiens
cgttcactcaygtttaactat

SEQ ID NO: 15917 - DNA, 21 bp, Homo sapiens
ctgactctttyatcataatga

SEQ ID NO: 15918 - DNA, 21 bp, Homo sapiens
cgggtggttaycatccttccc

SEQ ID NO: 15919 - DNA, 21 bp, Homo sapiens
cttgaattacwgttttgggta

SEQ ID NO: 15920 - DNA, 21 bp, Homo sapiens
tttcctgtgcrtggatgagca

SEQ ID NO: 15921 - DNA, 21 bp, Homo sapiens
agaggctggayccgctgaccg

SEQ ID NO: 15922 - DNA, 21 bp, Homo sapiens
tggggacacamagcttccttt

SEQ ID NO: 15923 - DNA, 21 bp, Homo sapiens
tcacttgtaayggtacaattc

SEQ ID NO: 15924 - DNA, 21 bp, Homo sapiens
gagaaccatasattcctgtga

SEQ ID NO: 15925 - DNA, 21 bp, Homo sapiens
gctcactggaygggggctggt

SEQ ID NO: 15926 - DNA, 21 bp, Homo sapiens
cttcacagccrtcccaggtga

SEQ ID NO: 15927 - DNA, 21 bp, Homo sapiens
ccttctgctcrctccacctgg

SEQ ID NO: 15928 - DNA, 21 bp, Homo sapiens
ataagtttatkgtatacacag

SEQ ID NO: 15929 - DNA, 21 bp, Homo sapiens
gtaacagcatraaactccttt

SEQ ID NO: 15930 - DNA, 21 bp, Homo sapiens
aatgacagatycaggactaat

SEQ ID NO: 15931 - DNA, 21 bp, Homo sapiens
tattagttgcsctctgagttt

SEQ ID NO: 15932 - DNA, 21 bp, Homo sapiens
caatttttaayaataataaat

SEQ ID NO: 15933 - DNA, 21 bp, Homo sapiens
ttttgtcacaytctcacctaa

SEQ ID NO: 15934 - DNA, 21 bp, Homo sapiens
ctggctcttcyccatgcttct

SEQ ID NO: 15935 - DNA, 21 bp, Homo sapiens
gtctagcactrtaacacatat

SEQ ID NO: 15936 - DNA, 21 bp, Homo sapiens
ataatagggaragaagcattt

SEQ ID NO: 15937 - DNA, 21 bp, Homo sapiens
taaacactgamgaggcctata

SEQ ID NO: 15938 - DNA, 21 bp, Homo sapiens
acagaatagcygtatatgtga

SEQ ID NO: 15939 - DNA, 21 bp, Homo sapiens
gtgcaaacctrctgtgtgctt

SEQ ID NO: 15940 - DNA, 21 bp, Homo sapiens
gacatgctaaraaatgggaaa

SEQ ID NO: 15941 - DNA, 21 bp, Homo sapiens
tgcttggtgarcaaactattc

SEQ ID NO: 15942 - DNA, 21 bp, Homo sapiens
ttagctataamattttgcatc

SEQ ID NO: 15943 - DNA, 21 bp, Homo sapiens
tcccactctcyaccttcaagt

SEQ ID NO: 15944 - DNA, 21 bp, Homo sapiens
gtaagcactargatttataga

SEQ ID NO: 15945 - DNA, 21 bp, Homo sapiens
aggcactttgygtgattcact

SEQ ID NO: 15946 - DNA, 21 bp, Homo sapiens
cgggtcagaarcagtggctct

SEQ ID NO: 15947 - DNA, 21 bp, Homo sapiens
gctaaagccayctccaccaag

SEQ ID NO: 15948 - DNA, 21 bp, Homo sapiens
tgtttccttgsgatgattatt

SEQ ID NO: 15949 - DNA, 21 bp, Homo sapiens
ctatatgcctrtttgaaatac

SEQ ID NO: 15950 - DNA, 21 bp, Homo sapiens
caaaacaataytctgtgtcca

SEQ ID NO: 15951 - DNA, 21 bp, Homo sapiens
cgtcttttcasaaaactaaat

SEQ ID NO: 15952 - DNA, 21 bp, Homo sapiens
tttaaacctaygctcttttca

SEQ ID NO: 15953 - DNA, 21 bp, Homo sapiens
gttatcagccrctatgtaaac

SEQ ID NO: 15954 - DNA, 21 bp, Homo sapiens
agttgttttartgaaaatgct

SEQ ID NO: 15955 - DNA, 21 bp, Homo sapiens
tgtgcttgacsatagcaataa

SEQ ID NO: 15956 - DNA, 21 bp, Homo sapiens
gtgcatcttgygtagcattaa

SEQ ID NO: 15957 - DNA, 21 bp, Homo sapiens
ccaaacatccrcagagcccca

SEQ ID NO: 15958 - DNA, 21 bp, Homo sapiens
cttagcatcgmgtctgctccg

SEQ ID NO: 15959 - DNA, 21 bp, Homo sapiens
tggaccaaggytctgcccaag

SEQ ID NO: 15960 - DNA, 21 bp, Homo sapiens
tcaccaggagrtagcacagtc

SEQ ID NO: 15961 - DNA, 21 bp, Homo sapiens
aaactatgagstccctttacc

SEQ ID NO: 15962 - DNA, 21 bp, Homo sapiens
aaaaggaggaycacaggtaca

SEQ ID NO: 15963 - DNA, 21 bp, Homo sapiens
tggttcactgytctataatgg

SEQ ID NO: 15964 - DNA, 21 bp, Homo sapiens
tgctgtacttyggtcatccag

SEQ ID NO: 15965 - DNA, 21 bp, Homo sapiens
gtttatagccrattctgcacc

SEQ ID NO: 15966 - DNA, 21 bp, Homo sapiens
ctgggtctacygggacctttg

SEQ ID NO: 15967 - DNA, 21 bp, Homo sapiens
acatgtgtgcrgtttcatgga

SEQ ID NO: 15968 - DNA, 21 bp, Homo sapiens
tcagctgggaracaagacata

SEQ ID NO: 15969 - DNA, 21 bp, Homo sapiens
tgctgccttgytcccaaggtg

SEQ ID NO: 15970 - DNA, 21 bp, Homo sapiens
ggagagaaccmtaacggagct

SEQ ID NO: 15971 - DNA, 21 bp, Homo sapiens
atttatgaaasttaagaaccc

SEQ ID NO: 15972 - DNA, 21 bp, Homo sapiens
acgatttgcaraaattatagt

SEQ ID NO: 15973 - DNA, 21 bp, Homo sapiens
ctgtgctaacstttgtggttc

SEQ ID NO: 15974 - DNA, 21 bp, Homo sapiens
gaagagcagayatattattgt

SEQ ID NO: 15975 - DNA, 21 bp, Homo sapiens
ggaactgagawaattttcaga

SEQ ID NO: 15976 - DNA, 21 bp, Homo sapiens
tagacaaaaayaactggcatg

SEQ ID NO: 15977 - DNA, 21 bp, Homo sapiens
ttcttggacaygccaattact

SEQ ID NO: 15978 - DNA, 21 bp, Homo sapiens
aaacatttcarcatcataatt

SEQ ID NO: 15979 - DNA, 21 bp, Homo sapiens
aagtgaaagarcaggtaaagt

SEQ ID NO: 15980 - DNA, 21 bp, Homo sapiens
tcattaaacaycaatctctat

SEQ ID NO: 15981 - DNA, 21 bp, Homo sapiens
acacatgttcrtgcactataa

SEQ ID NO: 15982 - DNA, 21 bp, Homo sapiens
cttccaggggkagcaaactgc

SEQ ID NO: 15983 - DNA, 21 bp, Homo sapiens
tatgaaggtgyggaatggtgc

SEQ ID NO: 15984 - DNA, 21 bp, Homo sapiens
aaatgccctcytttaacaaaa

SEQ ID NO: 15985 - DNA, 21 bp, Homo sapiens
ttttctgcagygcaccagctt

SEQ ID NO: 15986 - DNA, 21 bp, Homo sapiens
tcttacccaayacgacttgct

SEQ ID NO: 15987 - DNA, 21 bp, Homo sapiens
aatatctagtsagctgtacct

SEQ ID NO: 15988 - DNA, 21 bp, Homo sapiens
tcacgtgtccrcagctcatta

SEQ ID NO: 15989 - DNA, 21 bp, Homo sapiens
atatggtcaaygatatacatc

SEQ ID NO: 15990 - DNA, 21 bp, Homo sapiens
tttttttataytgtagcattc

SEQ ID NO: 15991 - DNA, 21 bp, Homo sapiens
tccatgtgtaraactttttct

SEQ ID NO: 15992 - DNA, 21 bp, Homo sapiens
gttcatagcarctacaaccag

SEQ ID NO: 15993 - DNA, 21 bp, Homo sapiens
aagtgtgaatratgctgaatg

SEQ ID NO: 15994 - DNA, 21 bp, Homo sapiens
gttctagaaayagccgattct

SEQ ID NO: 15995 - DNA, 21 bp, Homo sapiens
actcattcatktatgtactta

SEQ ID NO: 15996 - DNA, 21 bp, Homo sapiens
cagaaataagytggtggccct

SEQ ID NO: 15997 - DNA, 21 bp, Homo sapiens
tggcaacatayggatttagct

SEQ ID NO: 15998 - DNA, 21 bp, Homo sapiens
aaagtgttgaraaatatacag

SEQ ID NO: 15999 - DNA, 21 bp, Homo sapiens
ctccaaacccrgcaggaaata

SEQ ID NO: 16000 - DNA, 21 bp, Homo sapiens
acatgtttgakagcatgaaaa

SEQ ID NO: 16001 - DNA, 21 bp, Homo sapiens
ggtcacaatcktgaaagttta

SEQ ID NO: 16002 - DNA, 21 bp, Homo sapiens
tacctaaaacsgtctcttgta

SEQ ID NO: 16003 - DNA, 21 bp, Homo sapiens
tagggtgtagwttaagaccac

SEQ ID NO: 16004 - DNA, 21 bp, Homo sapiens
ttcacagaaayttcataaatg

SEQ ID NO: 16005 - DNA, 21 bp, Homo sapiens
ttgaggaaaargctatgtcac

SEQ ID NO: 16006 - DNA, 21 bp, Homo sapiens
agctcattatrccatcctaac

SEQ ID NO: 16007 - DNA, 21 bp, Homo sapiens
gattctatatytcaccaaatt

SEQ ID NO: 16008 - DNA, 21 bp, Homo sapiens
aacctaatgcrtggttgatat

SEQ ID NO: 16009 - DNA, 21 bp, Homo sapiens
gcagaatcccrtgaaccactt

SEQ ID NO: 16010 - DNA, 21 bp, Homo sapiens
ctccaacacasttagatttcc

SEQ ID NO: 16011 - DNA, 21 bp, Homo sapiens
ccccatctgcycaatccacag

SEQ ID NO: 16012 - DNA, 21 bp, Homo sapiens
aatacaggaargtaattagtt

SEQ ID NO: 16013 - DNA, 21 bp, Homo sapiens
tagcttctcgktaaatagaca

SEQ ID NO: 16014 - DNA, 21 bp, Homo sapiens
actgaaaaccrtcactctacc

SEQ ID NO: 16015 - DNA, 21 bp, Homo sapiens
gcatgtgcttyctgtctcttg

SEQ ID NO: 16016 - DNA, 21 bp, Homo sapiens
tctcccgttcraatcaaaatc

SEQ ID NO: 16017 - DNA, 21 bp, Homo sapiens
tgcagtgctgygtaatggact

SEQ ID NO: 16018 - DNA, 21 bp, Homo sapiens
gagccaaagtmctcaatggag

SEQ ID NO: 16019 - DNA, 21 bp, Homo sapiens
cagtagatctyctttagttgt

SEQ ID NO: 16020 - DNA, 21 bp, Homo sapiens
agcccagttgwtatggctaaa

SEQ ID NO: 16021 - DNA, 21 bp, Homo sapiens
attatgttgtmtactagccca

SEQ ID NO: 16022 - DNA, 21 bp, Homo sapiens
gtcatctctcrtatgaatcac

SEQ ID NO: 16023 - DNA, 21 bp, Homo sapiens
atttgtcgcarttttatacca

SEQ ID NO: 16024 - DNA, 21 bp, Homo sapiens
tgtgggttagycctccatgga

SEQ ID NO: 16025 - DNA, 21 bp, Homo sapiens
cagttgcacaycagtgtcagt

SEQ ID NO: 16026 - DNA, 21 bp, Homo sapiens
tatcttaattmaaaagggctg

SEQ ID NO: 16027 - DNA, 21 bp, Homo sapiens
aaaaagctackcaatgttttc

SEQ ID NO: 16028 - DNA, 21 bp, Homo sapiens
gagaatttaargtgactgtgg

SEQ ID NO: 16029 - DNA, 21 bp, Homo sapiens
aaagaactacyatctgttggg

SEQ ID NO: 16030 - DNA, 21 bp, Homo sapiens
ctcagtatatrtgaatggtac

SEQ ID NO: 16031 - DNA, 21 bp, Homo sapiens
tgattctcatrtatatttact

SEQ ID NO: 16032 - DNA, 21 bp, Homo sapiens
ggtgttgaaayggaggacatt

SEQ ID NO: 16033 - DNA, 21 bp, Homo sapiens
taaacctttasaccgttctgc

SEQ ID NO: 16034 - DNA, 21 bp, Homo sapiens
ataaccagagkattcattgca

SEQ ID NO: 16035 - DNA, 21 bp, Homo sapiens
gaaaggcttastgtacattct

SEQ ID NO: 16036 - DNA, 21 bp, Homo sapiens
gattcagtgtyagaactagaa

SEQ ID NO: 16037 - DNA, 21 bp, Homo sapiens
cttatttgcaygaaagttctt

SEQ ID NO: 16038 - DNA, 21 bp, Homo sapiens
cccatgcatawtgtacagcag

SEQ ID NO: 16039 - DNA, 21 bp, Homo sapiens
taaaaatggtragcagatata

SEQ ID NO: 16040 - DNA, 21 bp, Homo sapiens
aaacatactaygcatgactac

SEQ ID NO: 16041 - DNA, 21 bp, Homo sapiens
ctggtgtgtaraagagttggt

SEQ ID NO: 16042 - DNA, 21 bp, Homo sapiens
aaaacgggatkcctgggtcaa

SEQ ID NO: 16043 - DNA, 21 bp, Homo sapiens
aaaaattactygattaacctt

SEQ ID NO: 16044 - DNA, 21 bp, Homo sapiens
ataatgatgawctttcactca

SEQ ID NO: 16045 - DNA, 21 bp, Homo sapiens
actgccccaaygtgtgtcatg

SEQ ID NO: 16046 - DNA, 21 bp, Homo sapiens
catgaagactrtgttggaaca

SEQ ID NO: 16047 - DNA, 21 bp, Homo sapiens
ttacgttatakgccgaaagaa

SEQ ID NO: 16048 - DNA, 21 bp, Homo sapiens
aaatacaattkaaagcaccgt

SEQ ID NO: 16049 - DNA, 21 bp, Homo sapiens
cagaaagttaygaggacatgt

SEQ ID NO: 16050 - DNA, 21 bp, Homo sapiens
tttgtttcttygggctcagat

SEQ ID NO: 16051 - DNA, 21 bp, Homo sapiens
gactcacttcrtacccaggtc

SEQ ID NO: 16052 - DNA, 21 bp, Homo sapiens
aataaatagasaggtatggtc

SEQ ID NO: 16053 - DNA, 21 bp, Homo sapiens
ttctttagggrgaggctaggc

SEQ ID NO: 16054 - DNA, 21 bp, Homo sapiens
caataactatsaggaattgac

SEQ ID NO: 16055 - DNA, 21 bp, Homo sapiens
tgcacccattmatcaacttct

SEQ ID NO: 16056 - DNA, 21 bp, Homo sapiens
aggctgagcawccctaatcag

SEQ ID NO: 16057 - DNA, 21 bp, Homo sapiens
gagctaaaccytgttagtgta

SEQ ID NO: 16058 - DNA, 21 bp, Homo sapiens
acttatatggygatggtctga

SEQ ID NO: 16059 - DNA, 21 bp, Homo sapiens
agagaagatgygaacttttca

SEQ ID NO: 16060 - DNA, 21 bp, Homo sapiens
caagcgattayagtcatcttt

SEQ ID NO: 16061 - DNA, 21 bp, Homo sapiens
ctaaggaaatygggaattcat

SEQ ID NO: 16062 - DNA, 21 bp, Homo sapiens
ctttagaagayatatgtggag

SEQ ID NO: 16063 - DNA, 21 bp, Homo sapiens
cttttggggaycaataccaaa

SEQ ID NO: 16064 - DNA, 21 bp, Homo sapiens
tacagcatatytgaccccgaa

SEQ ID NO: 16065 - DNA, 21 bp, Homo sapiens
cttgaataggrgtttgggtaa

SEQ ID NO: 16066 - DNA, 21 bp, Homo sapiens
tcgatgattayaatctagctc

SEQ ID NO: 16067 - DNA, 21 bp, Homo sapiens
ttcaaatcctwctcgtttcag

SEQ ID NO: 16068 - DNA, 21 bp, Homo sapiens
tttcccataamtgttccatat

SEQ ID NO: 16069 - DNA, 21 bp, Homo sapiens
ttcatcaaggyaaataacaca

SEQ ID NO: 16070 - DNA, 21 bp, Homo sapiens
caaagcagccscaggtatggc

SEQ ID NO: 16071 - DNA, 21 bp, Homo sapiens
catagctgagragaagctgga

SEQ ID NO: 16072 - DNA, 21 bp, Homo sapiens
aaatcataaaycagtaagggt

SEQ ID NO: 16073 - DNA, 21 bp, Homo sapiens
tttaccagacyagcattgccc

SEQ ID NO: 16074 - DNA, 21 bp, Homo sapiens
gaacagtagtkgatacaagga

SEQ ID NO: 16075 - DNA, 21 bp, Homo sapiens
tctgtccaccraaaaggctta

SEQ ID NO: 16076 - DNA, 21 bp, Homo sapiens
acaaaatctgyaagataagta

SEQ ID NO: 16077 - DNA, 21 bp, Homo sapiens
agtggtagctrtaacatacat

SEQ ID NO: 16078 - DNA, 21 bp, Homo sapiens
tagtaattaamctagagaaat

SEQ ID NO: 16079 - DNA, 21 bp, Homo sapiens
gtgattagacscgagtaggtg

SEQ ID NO: 16080 - DNA, 21 bp, Homo sapiens
gtagccagttyccaatgagct

SEQ ID NO: 16081 - DNA, 21 bp, Homo sapiens
ttccaaagccmgacatgagcc

SEQ ID NO: 16082 - DNA, 21 bp, Homo sapiens
gaactcatctygatttatttc

SEQ ID NO: 16083 - DNA, 21 bp, Homo sapiens
ccagaatagawacttcctcaa

SEQ ID NO: 16084 - DNA, 21 bp, Homo sapiens
aggtgggctcrgtctctatgc

SEQ ID NO: 16085 - DNA, 21 bp, Homo sapiens
ctagggagggraccagctata

SEQ ID NO: 16086 - DNA, 21 bp, Homo sapiens
ttcagctgatraagtgagtga

SEQ ID NO: 16087 - DNA, 21 bp, Homo sapiens
gagtaggggtmcaactccctc

SEQ ID NO: 16088 - DNA, 21 bp, Homo sapiens
atgaccaaaascttttcagat

SEQ ID NO: 16089 - DNA, 21 bp, Homo sapiens
ggggcttgggyatgtaatttt

SEQ ID NO: 16090 - DNA, 21 bp, Homo sapiens
tctaaagagcycttctctgtt

SEQ ID NO: 16091 - DNA, 21 bp, Homo sapiens
gaaaaaagggktcttaattct

SEQ ID NO: 16092 - DNA, 21 bp, Homo sapiens
tgcaatgtttrtattctatca

SEQ ID NO: 16093 - DNA, 21 bp, Homo sapiens
tttagcagaargtaaaaatca

SEQ ID NO: 16094 - DNA, 21 bp, Homo sapiens
gttcacagtayatatgtgaca

SEQ ID NO: 16095 - DNA, 21 bp, Homo sapiens
gtccaaatttwaaaaaaaatc

SEQ ID NO: 16096 - DNA, 21 bp, Homo sapiens
atctatttgtytacctagatt

SEQ ID NO: 16097 - DNA, 21 bp, Homo sapiens
atgtatatacrcttactcctt

SEQ ID NO: 16098 - DNA, 21 bp, Homo sapiens
cacatatataycataagtgat

SEQ ID NO: 16099 - DNA, 21 bp, Homo sapiens
attttcttcaytgctttgagg

SEQ ID NO: 16100 - DNA, 21 bp, Homo sapiens
ggttctctacrtgtatagctc

SEQ ID NO: 16101 - DNA, 21 bp, Homo sapiens
ttgatctgtartatattctgt

SEQ ID NO: 16102 - DNA, 21 bp, Homo sapiens
aagactgtgtytattctttat

SEQ ID NO: 16103 - DNA, 21 bp, Homo sapiens
gcagatctctwcttggaggct

SEQ ID NO: 16104 - DNA, 21 bp, Homo sapiens
aaaggctccayggagcccaga

SEQ ID NO: 16105 - DNA, 21 bp, Homo sapiens
tactaagtgaycaactggcag

SEQ ID NO: 16106 - DNA, 21 bp, Homo sapiens
tttcctgtacmtaagtcagaa

SEQ ID NO: 16107 - DNA, 21 bp, Homo sapiens
taatacatccrggagctattt

SEQ ID NO: 16108 - DNA, 21 bp, Homo sapiens
agggaggacayggaagctctg

SEQ ID NO: 16109 - DNA, 21 bp, Homo sapiens
cccacagtacmccttacactg

SEQ ID NO: 16110 - DNA, 21 bp, Homo sapiens
aacaggacctrctagaatcaa

SEQ ID NO: 16111 - DNA, 21 bp, Homo sapiens
aggcatctatktagtcttcag

SEQ ID NO: 16112 - DNA, 21 bp, Homo sapiens
agtagtttagytgattgaaaa

SEQ ID NO: 16113 - DNA, 21 bp, Homo sapiens
ttgttgttttkgttcatatct

SEQ ID NO: 16114 - DNA, 21 bp, Homo sapiens
ttgaggttggygaaggtgaac

SEQ ID NO: 16115 - DNA, 21 bp, Homo sapiens
atggtttaccrtggttataca

SEQ ID NO: 16116 - DNA, 21 bp, Homo sapiens
aaagaaagttygttaaacatt

SEQ ID NO: 16117 - DNA, 21 bp, Homo sapiens
tttacttagcygacacaggaa

SEQ ID NO: 16118 - DNA, 21 bp, Homo sapiens
gatggcgcagygtactttcat

SEQ ID NO: 16119 - DNA, 21 bp, Homo sapiens
attacttaccmtgtaatataa

SEQ ID NO: 16120 - DNA, 21 bp, Homo sapiens
agtaagattgrtaaaaatgaa

SEQ ID NO: 16121 - DNA, 21 bp, Homo sapiens
aagaatagacraatagacaaa

SEQ ID NO: 16122 - DNA, 21 bp, Homo sapiens
ataaatctcartatatcagta

SEQ ID NO: 16123 - DNA, 21 bp, Homo sapiens
tacatacaaaraaatcttggc

SEQ ID NO: 16124 - DNA, 21 bp, Homo sapiens
ggtgagagtgygcatccttat

SEQ ID NO: 16125 - DNA, 21 bp, Homo sapiens
aagatatatgygaaagtaaag

SEQ ID NO: 16126 - DNA, 21 bp, Homo sapiens
ataattacagstatgattgaa

SEQ ID NO: 16127 - DNA, 21 bp, Homo sapiens
ggcacatttgytaaaatagat

SEQ ID NO: 16128 - DNA, 21 bp, Homo sapiens
ttatctctgargaacttttgg

SEQ ID NO: 16129 - DNA, 21 bp, Homo sapiens
atgttttctgrtgttgtaatc

SEQ ID NO: 16130 - DNA, 21 bp, Homo sapiens
taaacatagaytttctaatca

SEQ ID NO: 16131 - DNA, 21 bp, Homo sapiens
gagattaaatrtttttttcca

SEQ ID NO: 16132 - DNA, 21 bp, Homo sapiens
tttttctcctkttacattaac

SEQ ID NO: 16133 - DNA, 21 bp, Homo sapiens
gtgtgtgtgcrtgtgcatgtg

SEQ ID NO: 16134 - DNA, 21 bp, Homo sapiens
ctgaccttctyttcttcatgc

SEQ ID NO: 16135 - DNA, 21 bp, Homo sapiens
caaatgcagawttttcaggtc

SEQ ID NO: 16136 - DNA, 21 bp, Homo sapiens
gaagggaatgyctattacctc

SEQ ID NO: 16137 - DNA, 21 bp, Homo sapiens
gaataaaacawcaaatattca

SEQ ID NO: 16138 - DNA, 21 bp, Homo sapiens
agtaggtagcygtctgtgagg

SEQ ID NO: 16139 - DNA, 21 bp, Homo sapiens
ttccttaatawtccttcatgt

SEQ ID NO: 16140 - DNA, 21 bp, Homo sapiens
catctttttargttggcaaaa

SEQ ID NO: 16141 - DNA, 21 bp, Homo sapiens
ctccttgtacrctgataaggg

SEQ ID NO: 16142 - DNA, 21 bp, Homo sapiens
tgcagaaaccrgctgcagggg

SEQ ID NO: 16143 - DNA, 21 bp, Homo sapiens
tgatcctagcrtgcctggcat

SEQ ID NO: 16144 - DNA, 21 bp, Homo sapiens
acagaaagcaraacaaccaat

SEQ ID NO: 16145 - DNA, 21 bp, Homo sapiens
atatctcctgrgatcctctag

SEQ ID NO: 16146 - DNA, 21 bp, Homo sapiens
tctgatgactycctagattct

SEQ ID NO: 16147 - DNA, 21 bp, Homo sapiens
catttcagaartataagagcg

SEQ ID NO: 16148 - DNA, 21 bp, Homo sapiens
ctgcaatatasagtttttctt

SEQ ID NO: 16149 - DNA, 21 bp, Homo sapiens
agccagttgcrgaagatttac

SEQ ID NO: 16150 - DNA, 21 bp, Homo sapiens
aagtaaaatgrtgcaattata

SEQ ID NO: 16151 - DNA, 21 bp, Homo sapiens
ttaattttcartgctttaatg

SEQ ID NO: 16152 - DNA, 21 bp, Homo sapiens
gtatgccagaratgaagttgg

SEQ ID NO: 16153 - DNA, 21 bp, Homo sapiens
cttttaagaaycattgatcta

SEQ ID NO: 16154 - DNA, 21 bp, Homo sapiens
ctttcataatmtaggagggtt

SEQ ID NO: 16155 - DNA, 21 bp, Homo sapiens
catatgtggtytttgtatctg

SEQ ID NO: 16156 - DNA, 21 bp, Homo sapiens
tttatcctttyaatttccttt

SEQ ID NO: 16157 - DNA, 21 bp, Homo sapiens
ataattttgcyagatctagaa

SEQ ID NO: 16158 - DNA, 21 bp, Homo sapiens
gtggatctctmcgtcaagcac

SEQ ID NO: 16159 - DNA, 21 bp, Homo sapiens
aggtgtatacyggccaagttt

SEQ ID NO: 16160 - DNA, 21 bp, Homo sapiens
gagtgatatcmagtgagcggt

SEQ ID NO: 16161 - DNA, 21 bp, Homo sapiens
tgtttttgttygtgcttttct

SEQ ID NO: 16162 - DNA, 21 bp, Homo sapiens
gaaacctggayaaggcaacaa

SEQ ID NO: 16163 - DNA, 21 bp, Homo sapiens
acagtgaccasccctttcaaa

SEQ ID NO: 16164 - DNA, 21 bp, Homo sapiens
gcaggcagttycagctccccc

SEQ ID NO: 16165 - DNA, 21 bp, Homo sapiens
ttccttccatrtgaacaacag

SEQ ID NO: 16166 - DNA, 21 bp, Homo sapiens
gctcacttttycctatgaaca

SEQ ID NO: 16167 - DNA, 21 bp, Homo sapiens
tacaggcagtsagcataagca

SEQ ID NO: 16168 - DNA, 21 bp, Homo sapiens
cagtgcaggcragagctgtgg

SEQ ID NO: 16169 - DNA, 21 bp, Homo sapiens
ggaacttatamattcttcttt

SEQ ID NO: 16170 - DNA, 21 bp, Homo sapiens
cccaccagccrtcacattttt

SEQ ID NO: 16171 - DNA, 21 bp, Homo sapiens
tgccagagcamtccaagcaga

SEQ ID NO: 16172 - DNA, 21 bp, Homo sapiens
tcataaaaggyactatagctt

SEQ ID NO: 16173 - DNA, 21 bp, Homo sapiens
gtgtctattgmgatgaccata

SEQ ID NO: 16174 - DNA, 21 bp, Homo sapiens
ctttttttttkatcttggcag

SEQ ID NO: 16175 - DNA, 21 bp, Homo sapiens
gaacaggctgsagcactcttc

SEQ ID NO: 16176 - DNA, 21 bp, Homo sapiens
gaagctgtgartaagtgcatc

SEQ ID NO: 16177 - DNA, 21 bp, Homo sapiens
ctccaaccttygataaccatt

SEQ ID NO: 16178 - DNA, 21 bp, Homo sapiens
aatttcatgtrgcagctgtaa

SEQ ID NO: 16179 - DNA, 21 bp, Homo sapiens
aactcagtctyaacgactgtc

SEQ ID NO: 16180 - DNA, 21 bp, Homo sapiens
caaaataagaygtacatgtgg

SEQ ID NO: 16181 - DNA, 21 bp, Homo sapiens
tgaatatttgytgttttgagc

SEQ ID NO: 16182 - DNA, 21 bp, Homo sapiens
gcctagctcaytcttctccac

SEQ ID NO: 16183 - DNA, 21 bp, Homo sapiens
atgattagccracttgtgccc

SEQ ID NO: 16184 - DNA, 21 bp, Homo sapiens
ggtatttgtaktatgcttttg

SEQ ID NO: 16185 - DNA, 21 bp, Homo sapiens
gcgcttcctcygcgggtatga

SEQ ID NO: 16186 - DNA, 21 bp, Homo sapiens
ctagattgaakttaaccattt

SEQ ID NO: 16187 - DNA, 21 bp, Homo sapiens
catgaaagaayatgtctataa

SEQ ID NO: 16188 - DNA, 21 bp, Homo sapiens
ccctgaggaascctgatgagg

SEQ ID NO: 16189 - DNA, 21 bp, Homo sapiens
caggagcaggrccactgtgga

SEQ ID NO: 16190 - DNA, 21 bp, Homo sapiens
ccttcaaggarttatgggaaa

SEQ ID NO: 16191 - DNA, 21 bp, Homo sapiens
cattcccagakcaagcttact

SEQ ID NO: 16192 - DNA, 21 bp, Homo sapiens
aagcctgatayggctaaagaa

SEQ ID NO: 16193 - DNA, 21 bp, Homo sapiens
aggacccctaycaggactact

SEQ ID NO: 16194 - DNA, 21 bp, Homo sapiens
tgagtctattytttgggtttg

SEQ ID NO: 16195 - DNA, 21 bp, Homo sapiens
cacttgtgggyaatctcccaa

SEQ ID NO: 16196 - DNA, 21 bp, Homo sapiens
atgaaatgtcyagcatctttg

SEQ ID NO: 16197 - DNA, 21 bp, Homo sapiens
tactgggatcyggttttcatt

SEQ ID NO: 16198 - DNA, 21 bp, Homo sapiens
gacctccccaratttaaacct

SEQ ID NO: 16199 - DNA, 21 bp, Homo sapiens
acgacaggaaygtagattgtg

SEQ ID NO: 16200 - DNA, 21 bp, Homo sapiens
gatttgtctcyaagactttgg

SEQ ID NO: 16201 - DNA, 21 bp, Homo sapiens
ctcttctcccytcctcccacc

SEQ ID NO: 16202 - DNA, 21 bp, Homo sapiens
gagaaaactgrcacacagtta

SEQ ID NO: 16203 - DNA, 21 bp, Homo sapiens
atgctggtagraatgctagga

SEQ ID NO: 16204 - DNA, 21 bp, Homo sapiens
tcttttattaygtgctcctaa

SEQ ID NO: 16205 - DNA, 21 bp, Homo sapiens
ttaccatacayggactcttcc

SEQ ID NO: 16206 - DNA, 21 bp, Homo sapiens
catatgcaaartcaactccga

SEQ ID NO: 16207 - DNA, 21 bp, Homo sapiens
aaaattggatrgatgataaca

SEQ ID NO: 16208 - DNA, 21 bp, Homo sapiens
taaacagcagyacaatttaca

SEQ ID NO: 16209 - DNA, 21 bp, Homo sapiens
caaactccagkgttcaggcca

SEQ ID NO: 16210 - DNA, 21 bp, Homo sapiens
cccatctcccraataaagttt

SEQ ID NO: 16211 - DNA, 21 bp, Homo sapiens
cttcatgagasacatagagaa

SEQ ID NO: 16212 - DNA, 21 bp, Homo sapiens
agagagtaaawagtggagcca

SEQ ID NO: 16213 - DNA, 21 bp, Homo sapiens
tttatctattyttggtctttc

SEQ ID NO: 16214 - DNA, 21 bp, Homo sapiens
ctggattctaygtttgtaata

SEQ ID NO: 16215 - DNA, 21 bp, Homo sapiens
gcaaagctgakattttaacaa

SEQ ID NO: 16216 - DNA, 21 bp, Homo sapiens
aatcaaaaaawtaactctaaa

SEQ ID NO: 16217 - DNA, 21 bp, Homo sapiens
gaaaagggcayaattatttac

SEQ ID NO: 16218 - DNA, 21 bp, Homo sapiens
gataaaaaaaktttccctcta

SEQ ID NO: 16219 - DNA, 21 bp, Homo sapiens
tgtctgcaaaytatttatctg

SEQ ID NO: 16220 - DNA, 21 bp, Homo sapiens
taattccagawattatcagta

SEQ ID NO: 16221 - DNA, 21 bp, Homo sapiens
attaaaaacaytggagtgaaa

SEQ ID NO: 16222 - DNA, 21 bp, Homo sapiens
gaggagcttakctttagaaaa

SEQ ID NO: 16223 - DNA, 21 bp, Homo sapiens
aaataatgcayttctgtaagt

SEQ ID NO: 16224 - DNA, 21 bp, Homo sapiens
aggccctgggrtatttaggca

SEQ ID NO: 16225 - DNA, 21 bp, Homo sapiens
agatgaagagrgatgggtaaa

SEQ ID NO: 16226 - DNA, 21 bp, Homo sapiens
agtccaacatkatacttacta

SEQ ID NO: 16227 - DNA, 21 bp, Homo sapiens
atttataaatsgcaattcaaa

SEQ ID NO: 16228 - DNA, 21 bp, Homo sapiens
cagttttaaarttgaagaacc

SEQ ID NO: 16229 - DNA, 21 bp, Homo sapiens
attctcctgcygggtctgtaa

SEQ ID NO: 16230 - DNA, 21 bp, Homo sapiens
gtgcagcaagmctttgactgg

SEQ ID NO: 16231 - DNA, 21 bp, Homo sapiens
ttcattcaagstaaggtgaag

SEQ ID NO: 16232 - DNA, 21 bp, Homo sapiens
taagtagtgtyaaagtttgtt

SEQ ID NO: 16233 - DNA, 21 bp, Homo sapiens
aatgcaacttygtgaggttca

SEQ ID NO: 16234 - DNA, 21 bp, Homo sapiens
gttgtattccktgacatcctt

SEQ ID NO: 16235 - DNA, 21 bp, Homo sapiens
agggtctggaytgcttttgac

SEQ ID NO: 16236 - DNA, 21 bp, Homo sapiens
actgatttttyaatgtttgaa

SEQ ID NO: 16237 - DNA, 21 bp, Homo sapiens
ccctttttgcwcgcttcttct

SEQ ID NO: 16238 - DNA, 21 bp, Homo sapiens
cttacacatayacaagtgcag

SEQ ID NO: 16239 - DNA, 21 bp, Homo sapiens
tgatttatttytcaagcagtt

SEQ ID NO: 16240 - DNA, 21 bp, Homo sapiens
aaattgccaaycaagcctaat

SEQ ID NO: 16241 - DNA, 21 bp, Homo sapiens
agcgcgatggygtggcaagct

SEQ ID NO: 16242 - DNA, 21 bp, Homo sapiens
aatagtgataygagtatatga

SEQ ID NO: 16243 - DNA, 21 bp, Homo sapiens
aacaagacacmattttggaag

SEQ ID NO: 16244 - DNA, 21 bp, Homo sapiens
caaatagaggyttccaacaat

SEQ ID NO: 16245 - DNA, 21 bp, Homo sapiens
aaagctgaagwgagagagaca

SEQ ID NO: 16246 - DNA, 21 bp, Homo sapiens
cctaccacatrtgatacgttt

SEQ ID NO: 16247 - DNA, 21 bp, Homo sapiens
tttattatgtygaatctttga

SEQ ID NO: 16248 - DNA, 21 bp, Homo sapiens
ctgtgtatgcyttttacctgt

SEQ ID NO: 16249 - DNA, 21 bp, Homo sapiens
tggaagcattratcaggttcc

SEQ ID NO: 16250 - DNA, 21 bp, Homo sapiens
cagtcttcaaygattctaggt

SEQ ID NO: 16251 - DNA, 21 bp, Homo sapiens
atgggaaaatrtaacaaatct

SEQ ID NO: 16252 - DNA, 21 bp, Homo sapiens
tattacatgtytagattatat

SEQ ID NO: 16253 - DNA, 21 bp, Homo sapiens
aggatataccracatttaaag

SEQ ID NO: 16254 - DNA, 21 bp, Homo sapiens
tcattaatacscaaaattgta

SEQ ID NO: 16255 - DNA, 21 bp, Homo sapiens
cagctgctacyccttgacaga

SEQ ID NO: 16256 - DNA, 21 bp, Homo sapiens
ttgttctatgrccttctgtct

SEQ ID NO: 16257 - DNA, 21 bp, Homo sapiens
cccgccagagygttgttgcca

SEQ ID NO: 16258 - DNA, 21 bp, Homo sapiens
cactacgtggktgatgaaatt

SEQ ID NO: 16259 - DNA, 21 bp, Homo sapiens
aagttggctaygtaataaccc

SEQ ID NO: 16260 - DNA, 21 bp, Homo sapiens
aatttaaaagyaaatttttac

SEQ ID NO: 16261 - DNA, 21 bp, Homo sapiens
ctggatcaagkgtgctgaaac

SEQ ID NO: 16262 - DNA, 21 bp, Homo sapiens
ttggtctcagrcctggaaaga

SEQ ID NO: 16263 - DNA, 21 bp, Homo sapiens
gcatgttctgwtttacctgct

SEQ ID NO: 16264 - DNA, 21 bp, Homo sapiens
tatatatatawaattgaacct

SEQ ID NO: 16265 - DNA, 21 bp, Homo sapiens
atgtacattartgactgctta

SEQ ID NO: 16266 - DNA, 21 bp, Homo sapiens
gaacagttaayatgaggtcta

SEQ ID NO: 16267 - DNA, 21 bp, Homo sapiens
ttttaatatartatctactaa

SEQ ID NO: 16268 - DNA, 21 bp, Homo sapiens
tccgcgtcggrgctttgcggg

SEQ ID NO: 16269 - DNA, 21 bp, Homo sapiens
taatggaataktttatatatg

SEQ ID NO: 16270 - DNA, 21 bp, Homo sapiens
gctaaacttargaaatttcca

SEQ ID NO: 16271 - DNA, 21 bp, Homo sapiens
ggaatgagttmctagaggtta

SEQ ID NO: 16272 - DNA, 21 bp, Homo sapiens
tagaagtatayatgttgatct

SEQ ID NO: 16273 - DNA, 21 bp, Homo sapiens
tatttatgctytttcaccatt

SEQ ID NO: 16274 - DNA, 21 bp, Homo sapiens
taacatctgcrttccacagag

SEQ ID NO: 16275 - DNA, 21 bp, Homo sapiens
tatacaattcraagttctatt

SEQ ID NO: 16276 - DNA, 21 bp, Homo sapiens
agatttttaaraaatggcctg

SEQ ID NO: 16277 - DNA, 21 bp, Homo sapiens
cagtgaatctyggtgtcgatt

SEQ ID NO: 16278 - DNA, 21 bp, Homo sapiens
aatcaatggargaaataagat

SEQ ID NO: 16279 - DNA, 21 bp, Homo sapiens
aatgaaggtartaaaatacct

SEQ ID NO: 16280 - DNA, 21 bp, Homo sapiens
tttttcaaacmtctttcggca

SEQ ID NO: 16281 - DNA, 21 bp, Homo sapiens
tgctagttttraaatatctat

SEQ ID NO: 16282 - DNA, 21 bp, Homo sapiens
atcctcatatrcagatagcaa

SEQ ID NO: 16283 - DNA, 21 bp, Homo sapiens
tgtgaggtaartgtatcaggg

SEQ ID NO: 16284 - DNA, 21 bp, Homo sapiens
caactgacatrtcaactatgg

SEQ ID NO: 16285 - DNA, 21 bp, Homo sapiens
gtgctttaatracttcaattt

SEQ ID NO: 16286 - DNA, 21 bp, Homo sapiens
gggacagagcraagttgtatt

SEQ ID NO: 16287 - DNA, 21 bp, Homo sapiens
ttgtttaaggwcaaaagacaa

SEQ ID NO: 16288 - DNA, 21 bp, Homo sapiens
atctagaagtkgtataaatca

SEQ ID NO: 16289 - DNA, 21 bp, Homo sapiens
gagtgtgtagrtgatgaactg

SEQ ID NO: 16290 - DNA, 21 bp, Homo sapiens
tttataaattsgttaggaaaa

SEQ ID NO: 16291 - DNA, 21 bp, Homo sapiens
cagactctgtsatcagagttt

SEQ ID NO: 16292 - DNA, 21 bp, Homo sapiens
tttattaagasaaaaaaacta

SEQ ID NO: 16293 - DNA, 21 bp, Homo sapiens
gtatagagtakaaaaactaga

SEQ ID NO: 16294 - DNA, 21 bp, Homo sapiens
actattttgtyattatggatc

SEQ ID NO: 16295 - DNA, 21 bp, Homo sapiens
acatgaacacrttcattgcag

SEQ ID NO: 16296 - DNA, 21 bp, Homo sapiens
aaaagtttaamtgacaaagct

SEQ ID NO: 16297 - DNA, 21 bp, Homo sapiens
tgagaagggawagttgttcag

SEQ ID NO: 16298 - DNA, 21 bp, Homo sapiens
tgctgaatatyctcaatttca

SEQ ID NO: 16299 - DNA, 21 bp, Homo sapiens
aattgagcacygttctgtaga

SEQ ID NO: 16300 - DNA, 21 bp, Homo sapiens
atttcatgtargaatcactgt

SEQ ID NO: 16301 - DNA, 21 bp, Homo sapiens
cacttatgggmaattattatt

SEQ ID NO: 16302 - DNA, 21 bp, Homo sapiens
gttttgttttktttttttttt

SEQ ID NO: 16303 - DNA, 21 bp, Homo sapiens
ttgtttactcstttttgtcat

SEQ ID NO: 16304 - DNA, 21 bp, Homo sapiens
aatggcagatwagagaatacc

SEQ ID NO: 16305 - DNA, 21 bp, Homo sapiens
aaatccttgtytttgttcagt

SEQ ID NO: 16306 - DNA, 21 bp, Homo sapiens
taaattgcttrtgattaattg

SEQ ID NO: 16307 - DNA, 21 bp, Homo sapiens
gggatttttgrtgtaagtgaa

SEQ ID NO: 16308 - DNA, 21 bp, Homo sapiens
gtgggcccgcyatgataattc

SEQ ID NO: 16309 - DNA, 21 bp, Homo sapiens
ggttgtagttycctgttttga

SEQ ID NO: 16310 - DNA, 21 bp, Homo sapiens
ccagtctctaygtgattaact

SEQ ID NO: 16311 - DNA, 21 bp, Homo sapiens
catggcatagwcacagaaaaa

SEQ ID NO: 16312 - DNA, 21 bp, Homo sapiens
cttctaaataraagatgagtc

SEQ ID NO: 16313 - DNA, 21 bp, Homo sapiens
ctttgggtgaraagaaataaa

SEQ ID NO: 16314 - DNA, 21 bp, Homo sapiens
tcctctgtcarttctccatgc

SEQ ID NO: 16315 - DNA, 21 bp, Homo sapiens
tcctcttctgyttttctcacc

SEQ ID NO: 16316 - DNA, 21 bp, Homo sapiens
atattcacaayttaaacataa

SEQ ID NO: 16317 - DNA, 21 bp, Homo sapiens
ataaaagtcaygaatattcag

SEQ ID NO: 16318 - DNA, 21 bp, Homo sapiens
atgttgcaagytaagtatagt

SEQ ID NO: 16319 - DNA, 21 bp, Homo sapiens
cttttctgggycaccagtaac

SEQ ID NO: 16320 - DNA, 21 bp, Homo sapiens
tattaaggagrtaagtggttt

SEQ ID NO: 16321 - DNA, 21 bp, Homo sapiens
tttacaagccmgcactttgta

SEQ ID NO: 16322 - DNA, 21 bp, Homo sapiens
caacactattkattgcccttc

SEQ ID NO: 16323 - DNA, 21 bp, Homo sapiens
acggaaaagcracagtaaaat

SEQ ID NO: 16324 - DNA, 21 bp, Homo sapiens
ttgtgtatacrtgaagcctag

SEQ ID NO: 16325 - DNA, 21 bp, Homo sapiens
ctggatgtaasagtaattctg

SEQ ID NO: 16326 - DNA, 21 bp, Homo sapiens
tcttttttttwattttgtttc

SEQ ID NO: 16327 - DNA, 21 bp, Homo sapiens
ctacacagatkattttttatg

SEQ ID NO: 16328 - DNA, 21 bp, Homo sapiens
ttttttcacaytcgcaatttt

SEQ ID NO: 16329 - DNA, 21 bp, Homo sapiens
ttctttttttwaaaaaaaatc

SEQ ID NO: 16330 - DNA, 21 bp, Homo sapiens
tcagctcctgraggacagaaa

SEQ ID NO: 16331 - DNA, 21 bp, Homo sapiens
gctttctcaamggtttcctga

SEQ ID NO: 16332 - DNA, 21 bp, Homo sapiens
aatgcttcaamtttcaaccta

SEQ ID NO: 16333 - DNA, 21 bp, Homo sapiens
gcattcattasgagactggaa

SEQ ID NO: 16334 - DNA, 21 bp, Homo sapiens
ccactattctytttgttttaa

SEQ ID NO: 16335 - DNA, 21 bp, Homo sapiens
gaagtgcaggyggcagctaaa

SEQ ID NO: 16336 - DNA, 21 bp, Homo sapiens
taatctatcaytgtggttttg

SEQ ID NO: 16337 - DNA, 21 bp, Homo sapiens
caagtgtgggrctcttctaag

SEQ ID NO: 16338 - DNA, 21 bp, Homo sapiens
acttttgtagkcactgtaagg

SEQ ID NO: 16339 - DNA, 21 bp, Homo sapiens
gaatagttacyagaatgatca

SEQ ID NO: 16340 - DNA, 21 bp, Homo sapiens
atgcaactaarctttttactc

SEQ ID NO: 16341 - DNA, 21 bp, Homo sapiens
acccctgatakgtctgtgaag

SEQ ID NO: 16342 - DNA, 21 bp, Homo sapiens
agttattaacyggggagtcaa

SEQ ID NO: 16343 - DNA, 21 bp, Homo sapiens
tgtttattacytccttcggag

SEQ ID NO: 16344 - DNA, 21 bp, Homo sapiens
tttggatgctstacctaataa

SEQ ID NO: 16345 - DNA, 21 bp, Homo sapiens
tgttgttgaargcctccttta

SEQ ID NO: 16346 - DNA, 21 bp, Homo sapiens
tagacctcaawataagacttc

SEQ ID NO: 16347 - DNA, 21 bp, Homo sapiens
taaataagctrtccctaaaag

SEQ ID NO: 16348 - DNA, 21 bp, Homo sapiens
cacaatgtttsccaaagagag

SEQ ID NO: 16349 - DNA, 21 bp, Homo sapiens
ttccagaaaartgcagtgaca

SEQ ID NO: 16350 - DNA, 21 bp, Homo sapiens
tctgtgatagrctgacttgtg

SEQ ID NO: 16351 - DNA, 21 bp, Homo sapiens
ctacagtgctyacatatttca

SEQ ID NO: 16352 - DNA, 21 bp, Homo sapiens
ttctaggaatytcaaagtaca

SEQ ID NO: 16353 - DNA, 21 bp, Homo sapiens
tgaataatatstccaaattat

SEQ ID NO: 16354 - DNA, 21 bp, Homo sapiens
gagaagagctraacgagtaga

SEQ ID NO: 16355 - DNA, 21 bp, Homo sapiens
ataattaacarttgttttcag

SEQ ID NO: 16356 - DNA, 21 bp, Homo sapiens
tttagaaaaaytgaggtggtg

SEQ ID NO: 16357 - DNA, 21 bp, Homo sapiens
catcatggctrtcaatataaa

SEQ ID NO: 16358 - DNA, 21 bp, Homo sapiens
attgccacacyaagaccaagc

SEQ ID NO: 16359 - DNA, 21 bp, Homo sapiens
cacatacagtygtgcggaccc

SEQ ID NO: 16360 - DNA, 21 bp, Homo sapiens
aaccattttcwagtaaagcca

SEQ ID NO: 16361 - DNA, 21 bp, Homo sapiens
aagcatcttcwgtgtgccaga

SEQ ID NO: 16362 - DNA, 21 bp, Homo sapiens
ccaggagatgycacctcagcc

SEQ ID NO: 16363 - DNA, 21 bp, Homo sapiens
atctttggtayattgtggatg

SEQ ID NO: 16364 - DNA, 21 bp, Homo sapiens
ctttcacctgytacaaacttc

SEQ ID NO: 16365 - DNA, 21 bp, Homo sapiens
agattgtcctygatataatat

SEQ ID NO: 16366 - DNA, 21 bp, Homo sapiens
aactagatgtyatggtaacta

SEQ ID NO: 16367 - DNA, 21 bp, Homo sapiens
ccacccaggarttgcaaaata

SEQ ID NO: 16368 - DNA, 21 bp, Homo sapiens
ggtctgtcccmggctcccttc

SEQ ID NO: 16369 - DNA, 21 bp, Homo sapiens
aatgtgcttaygaagataaag

SEQ ID NO: 16370 - DNA, 21 bp, Homo sapiens
accctgtgccmccctaatatt

SEQ ID NO: 16371 - DNA, 21 bp, Homo sapiens
aatatttttartgatgagaca

SEQ ID NO: 16372 - DNA, 21 bp, Homo sapiens
atctgaatacmgtccccactt

SEQ ID NO: 16373 - DNA, 21 bp, Homo sapiens
ttttaagaatyatcctgggtg

SEQ ID NO: 16374 - DNA, 21 bp, Homo sapiens
gtgagttgaaytattttccat

SEQ ID NO: 16375 - DNA, 21 bp, Homo sapiens
tgctgaactcwcctcaaggaa

SEQ ID NO: 16376 - DNA, 21 bp, Homo sapiens
ttttggttttrcagtgtttgt

SEQ ID NO: 16377 - DNA, 21 bp, Homo sapiens
taataattaaycatgaccggt

SEQ ID NO: 16378 - DNA, 21 bp, Homo sapiens
tcattcttcayagtgtacaat

SEQ ID NO: 16379 - DNA, 21 bp, Homo sapiens
aaaaggacttygacaaataat

SEQ ID NO: 16380 - DNA, 21 bp, Homo sapiens
aaaatggtggygtcgaaggaa

SEQ ID NO: 16381 - DNA, 21 bp, Homo sapiens
cttaaatttgwccaaaagcat

SEQ ID NO: 16382 - DNA, 21 bp, Homo sapiens
acataaatggmattttgaaat

SEQ ID NO: 16383 - DNA, 21 bp, Homo sapiens
acttatctccwtcaattcatc

SEQ ID NO: 16384 - DNA, 21 bp, Homo sapiens
gattttgacayagaaagtcaa

SEQ ID NO: 16385 - DNA, 21 bp, Homo sapiens
tcttaaataasttttcttaaa

SEQ ID NO: 16386 - DNA, 21 bp, Homo sapiens
acttaaaacgytggacaaaat

SEQ ID NO: 16387 - DNA, 21 bp, Homo sapiens
ctacaaaagtkacaaataaat

SEQ ID NO: 16388 - DNA, 21 bp, Homo sapiens
gcatatagatktatccattat

SEQ ID NO: 16389 - DNA, 21 bp, Homo sapiens
aaaaattcctrtgtgagaaaa

SEQ ID NO: 16390 - DNA, 21 bp, Homo sapiens
tttaaactcarggtttttaaa

SEQ ID NO: 16391 - DNA, 21 bp, Homo sapiens
aagcttcaatyagtcatgcct

SEQ ID NO: 16392 - DNA, 21 bp, Homo sapiens
agtaattaatytggggtttta

SEQ ID NO: 16393 - DNA, 21 bp, Homo sapiens
agccaagagcmacattaaaaa

SEQ ID NO: 16394 - DNA, 21 bp, Homo sapiens
ctctctggtaytcctgaaatg

SEQ ID NO: 16395 - DNA, 21 bp, Homo sapiens
catctttataytggtctctat

SEQ ID NO: 16396 - DNA, 21 bp, Homo sapiens
accaatccagkgagtgactcg

SEQ ID NO: 16397 - DNA, 21 bp, Homo sapiens
cagggaccacytgctgcagct

SEQ ID NO: 16398 - DNA, 21 bp, Homo sapiens
gattgtttctsttaggaaaaa

SEQ ID NO: 16399 - DNA, 21 bp, Homo sapiens
taccttactgragggtttgca

SEQ ID NO: 16400 - DNA, 21 bp, Homo sapiens
ttggaccctarcagttggaaa

SEQ ID NO: 16401 - DNA, 21 bp, Homo sapiens
aagaacgatcratatgaaata

SEQ ID NO: 16402 - DNA, 21 bp, Homo sapiens
tcctcttcaaratagggtagt

SEQ ID NO: 16403 - DNA, 21 bp, Homo sapiens
ccttaaaaatrttctttaact

SEQ ID NO: 16404 - DNA, 21 bp, Homo sapiens
gtatccttatwtcacgaatga

SEQ ID NO: 16405 - DNA, 21 bp, Homo sapiens
tcatggtatartatatgccaa

SEQ ID NO: 16406 - DNA, 21 bp, Homo sapiens
atcagattccraaatcttagc

SEQ ID NO: 16407 - DNA, 21 bp, Homo sapiens
tccttttatamatttttatat

SEQ ID NO: 16408 - DNA, 21 bp, Homo sapiens
gaatagccatragggtaataa

SEQ ID NO: 16409 - DNA, 21 bp, Homo sapiens
tactatatgakttgtatttga

SEQ ID NO: 16410 - DNA, 21 bp, Homo sapiens
aatattacatyaaaaacaaaa

SEQ ID NO: 16411 - DNA, 21 bp, Homo sapiens
ccataaacggragataatatt

SEQ ID NO: 16412 - DNA, 21 bp, Homo sapiens
tcatatatccraagcagttca

SEQ ID NO: 16413 - DNA, 21 bp, Homo sapiens
gagaacatgtkggaagtggct

SEQ ID NO: 16414 - DNA, 21 bp, Homo sapiens
aaattacccaytttgtcatct

SEQ ID NO: 16415 - DNA, 21 bp, Homo sapiens
ctcagttcttyactttgtttc

SEQ ID NO: 16416 - DNA, 21 bp, Homo sapiens
cctttgcatasaggtttctgt

SEQ ID NO: 16417 - DNA, 21 bp, Homo sapiens
ataaatgacamataataatag

SEQ ID NO: 16418 - DNA, 21 bp, Homo sapiens
acaataatagsttctgctgaa

SEQ ID NO: 16419 - DNA, 21 bp, Homo sapiens
gtaaagactgmagtcatcgac

SEQ ID NO: 16420 - DNA, 21 bp, Homo sapiens
gagaggaatayctaacaagtc

SEQ ID NO: 16421 - DNA, 21 bp, Homo sapiens
ccctttcttaygtggttggtt

SEQ ID NO: 16422 - DNA, 21 bp, Homo sapiens
taatttttagyggagcatgac

SEQ ID NO: 16423 - DNA, 21 bp, Homo sapiens
tactccacttstgctggagtc

SEQ ID NO: 16424 - DNA, 21 bp, Homo sapiens
catattatgcrggcaggaaag

SEQ ID NO: 16425 - DNA, 21 bp, Homo sapiens
ttgtgatctgrttttctttag

SEQ ID NO: 16426 - DNA, 21 bp, Homo sapiens
tacaaactctrtgaccttaga

SEQ ID NO: 16427 - DNA, 21 bp, Homo sapiens
tacaacatgtrcattaaatta

SEQ ID NO: 16428 - DNA, 21 bp, Homo sapiens
caggtcagtaygccaaaggcc

SEQ ID NO: 16429 - DNA, 21 bp, Homo sapiens
aatttattgartgtgaaatgc

SEQ ID NO: 16430 - DNA, 21 bp, Homo sapiens
cagtaaaacaktaaagctgaa

SEQ ID NO: 16431 - DNA, 21 bp, Homo sapiens
taacattctcraagatgtcaa

SEQ ID NO: 16432 - DNA, 21 bp, Homo sapiens
ttgtgggatgmatcctacaga

SEQ ID NO: 16433 - DNA, 21 bp, Homo sapiens
agtattgtctrtcattgccat

SEQ ID NO: 16434 - DNA, 21 bp, Homo sapiens
tactgatgctytaagggagtt

SEQ ID NO: 16435 - DNA, 21 bp, Homo sapiens
gagattcaaamgttatacttg

SEQ ID NO: 16436 - DNA, 21 bp, Homo sapiens
aatggggtttygtatgtaggc

SEQ ID NO: 16437 - DNA, 21 bp, Homo sapiens
agcagaaaatrgacaggaatc

SEQ ID NO: 16438 - DNA, 21 bp, Homo sapiens
atgatggcaamagagcatagg

SEQ ID NO: 16439 - DNA, 21 bp, Homo sapiens
ttatagcctarttgaatcatc

SEQ ID NO: 16440 - DNA, 21 bp, Homo sapiens
cagtagcgtasattttggtat

SEQ ID NO: 16441 - DNA, 21 bp, Homo sapiens
gggagacaaayttgcaaatct

SEQ ID NO: 16442 - DNA, 21 bp, Homo sapiens
agtgatgagaraagcccattt

SEQ ID NO: 16443 - DNA, 21 bp, Homo sapiens
atatgaaaacmcatattgaaa

SEQ ID NO: 16444 - DNA, 21 bp, Homo sapiens
tattttcatgrggtatatggt

SEQ ID NO: 16445 - DNA, 21 bp, Homo sapiens
gattggaagtytaaaagtcca

SEQ ID NO: 16446 - DNA, 21 bp, Homo sapiens
cagaatatctrtgaaatgaaa

SEQ ID NO: 16447 - DNA, 21 bp, Homo sapiens
atttatgtacrtgctggctta

SEQ ID NO: 16448 - DNA, 21 bp, Homo sapiens
ccccatgaacytgttaaactg

SEQ ID NO: 16449 - DNA, 21 bp, Homo sapiens
aagtgaaagarattgttatcc

SEQ ID NO: 16450 - DNA, 21 bp, Homo sapiens
cttagaagttmcacatgatgc

SEQ ID NO: 16451 - DNA, 21 bp, Homo sapiens
agacaatacartttaaaaaat

SEQ ID NO: 16452 - DNA, 21 bp, Homo sapiens
actcaagctgragctcacatg

SEQ ID NO: 16453 - DNA, 21 bp, Homo sapiens
taagcactggwaccagatggg

SEQ ID NO: 16454 - DNA, 21 bp, Homo sapiens
ttcattcagtrttagatctgt

SEQ ID NO: 16455 - DNA, 21 bp, Homo sapiens
ttgtttctatmaggaatgaga

SEQ ID NO: 16456 - DNA, 21 bp, Homo sapiens
tctggaactgygaaaaataga

SEQ ID NO: 16457 - DNA, 21 bp, Homo sapiens
tatcctttgtscttttttttt

SEQ ID NO: 16458 - DNA, 21 bp, Homo sapiens
catattaagaraaaaaaccta

SEQ ID NO: 16459 - DNA, 21 bp, Homo sapiens
attgtgttgcraatatctgaa

SEQ ID NO: 16460 - DNA, 21 bp, Homo sapiens
gcatcactaartactgatttt

SEQ ID NO: 16461 - DNA, 21 bp, Homo sapiens
aatgagttatrttttttatag

SEQ ID NO: 16462 - DNA, 21 bp, Homo sapiens
atgttccatcrtatgtacata

SEQ ID NO: 16463 - DNA, 21 bp, Homo sapiens
aaaagaaccartaatctttag

SEQ ID NO: 16464 - DNA, 21 bp, Homo sapiens
tataatcttakggggccatca

SEQ ID NO: 16465 - DNA, 21 bp, Homo sapiens
ctctgagtctyattgttgctt

SEQ ID NO: 16466 - DNA, 21 bp, Homo sapiens
aatacatcaayagacagaaaa

SEQ ID NO: 16467 - DNA, 21 bp, Homo sapiens
aaaccaaagawaatactaaaa

SEQ ID NO: 16468 - DNA, 21 bp, Homo sapiens
aaaccaaaacraaaataagtc

SEQ ID NO: 16469 - DNA, 21 bp, Homo sapiens
atcttttacawgaaggtctct

SEQ ID NO: 16470 - DNA, 21 bp, Homo sapiens
caatcgttccrcactttgcac

SEQ ID NO: 16471 - DNA, 21 bp, Homo sapiens
atgttctttgyagtaataatt

SEQ ID NO: 16472 - DNA, 21 bp, Homo sapiens
ggattagttgraaacaaaaaa

SEQ ID NO: 16473 - DNA, 21 bp, Homo sapiens
tcttatgccasaacgaggttt

SEQ ID NO: 16474 - DNA, 21 bp, Homo sapiens
taaatagattkagagtctagc

SEQ ID NO: 16475 - DNA, 21 bp, Homo sapiens
gtatatacaayatataagtcg

SEQ ID NO: 16476 - DNA, 21 bp, Homo sapiens
aaataacataytttttacttt

SEQ ID NO: 16477 - DNA, 21 bp, Homo sapiens
gaacatatgartgcatgcatt

SEQ ID NO: 16478 - DNA, 21 bp, Homo sapiens
tggcataaccycatcactcaa

SEQ ID NO: 16479 - DNA, 21 bp, Homo sapiens
ctgaggcctgytaagagcatt

SEQ ID NO: 16480 - DNA, 21 bp, Homo sapiens
cccatcacctragacaatgga

SEQ ID NO: 16481 - DNA, 21 bp, Homo sapiens
cacaaattaaygaacaccata

SEQ ID NO: 16482 - DNA, 21 bp, Homo sapiens
acttgccagakagggagccaa

SEQ ID NO: 16483 - DNA, 21 bp, Homo sapiens
atgccagcaargtggtcttta

SEQ ID NO: 16484 - DNA, 21 bp, Homo sapiens
cctctcaatamaataaagttt

SEQ ID NO: 16485 - DNA, 21 bp, Homo sapiens
cgaaaatcaayttatcatcac

SEQ ID NO: 16486 - DNA, 21 bp, Homo sapiens
tttttttcaasggttccaagt

SEQ ID NO: 16487 - DNA, 21 bp, Homo sapiens
tgtaaatttaygtctgttacc

SEQ ID NO: 16488 - DNA, 21 bp, Homo sapiens
tgctaaaattmtcagggcaat

SEQ ID NO: 16489 - DNA, 21 bp, Homo sapiens
agggaccaaakattttgcagg

SEQ ID NO: 16490 - DNA, 21 bp, Homo sapiens
gcattttcacrttgttgattg

SEQ ID NO: 16491 - DNA, 21 bp, Homo sapiens
ttattcattcmaaagtgaatt

SEQ ID NO: 16492 - DNA, 21 bp, Homo sapiens
aaccattacaraaattattca

SEQ ID NO: 16493 - DNA, 21 bp, Homo sapiens
ctttcttaaasttttcatctc

SEQ ID NO: 16494 - DNA, 21 bp, Homo sapiens
ccaatttctayctaccattct

SEQ ID NO: 16495 - DNA, 21 bp, Homo sapiens
atttttaatgwctccctttta

SEQ ID NO: 16496 - DNA, 21 bp, Homo sapiens
ctgaggcctcyattccaagac

SEQ ID NO: 16497 - DNA, 21 bp, Homo sapiens
agaggtaaatrtaagtagcct

SEQ ID NO: 16498 - DNA, 21 bp, Homo sapiens
agaaaactcartagattatgt

SEQ ID NO: 16499 - DNA, 21 bp, Homo sapiens
gtctacaatgmaatttcttga

SEQ ID NO: 16500 - DNA, 21 bp, Homo sapiens
atttttccacwaattattgtg

SEQ ID NO: 16501 - DNA, 21 bp, Homo sapiens
gaggtgggtarctgggccaaa

SEQ ID NO: 16502 - DNA, 21 bp, Homo sapiens
gttcaaagggscctgagaaag

SEQ ID NO: 16503 - DNA, 21 bp, Homo sapiens
gtttaaaataygtagaactga

SEQ ID NO: 16504 - DNA, 21 bp, Homo sapiens
acaaagttcaytgcctacaga

SEQ ID NO: 16505 - DNA, 21 bp, Homo sapiens
tttgagtatgwgccatatgca

SEQ ID NO: 16506 - DNA, 21 bp, Homo sapiens
acatgtgccartgttggggga

SEQ ID NO: 16507 - DNA, 21 bp, Homo sapiens
tagaaagtaaytcattatttt

SEQ ID NO: 16508 - DNA, 21 bp, Homo sapiens
acattttataytttagtggct

SEQ ID NO: 16509 - DNA, 21 bp, Homo sapiens
agggctaaaascaaaaagatc

SEQ ID NO: 16510 - DNA, 21 bp, Homo sapiens
tagcaaagggyatcatatggc

SEQ ID NO: 16511 - DNA, 21 bp, Homo sapiens
aatatttgatkgggtgtgaaa

SEQ ID NO: 16512 - DNA, 21 bp, Homo sapiens
gagattgagartacttttgtt

SEQ ID NO: 16513 - DNA, 21 bp, Homo sapiens
catattcatawtccagcaact

SEQ ID NO: 16514 - DNA, 21 bp, Homo sapiens
tattagttaarattacatttg

SEQ ID NO: 16515 - DNA, 21 bp, Homo sapiens
ctggtgaggargaatgggtca

SEQ ID NO: 16516 - DNA, 21 bp, Homo sapiens
acttctattgracccctcacc

SEQ ID NO: 16517 - DNA, 21 bp, Homo sapiens
atttatgcatytgtggtgagg

SEQ ID NO: 16518 - DNA, 21 bp, Homo sapiens
ctgaatttaayaatggcttgt

SEQ ID NO: 16519 - DNA, 21 bp, Homo sapiens
ataaagaatayctgacaatga

SEQ ID NO: 16520 - DNA, 21 bp, Homo sapiens
agataatgaargtcacataca

SEQ ID NO: 16521 - DNA, 21 bp, Homo sapiens
taaatattttyacatgaaata

SEQ ID NO: 16522 - DNA, 21 bp, Homo sapiens
caagtttaaakattttgtgtt

SEQ ID NO: 16523 - DNA, 21 bp, Homo sapiens
atttatcagayaaatcatcat

SEQ ID NO: 16524 - DNA, 21 bp, Homo sapiens
agagtcctaayttccagtgtc

SEQ ID NO: 16525 - DNA, 21 bp, Homo sapiens
caatcacttaygtggctaata

SEQ ID NO: 16526 - DNA, 21 bp, Homo sapiens
caatataatgyattttgtttt

SEQ ID NO: 16527 - DNA, 21 bp, Homo sapiens
acaaaggaacyaggtctcaga

SEQ ID NO: 16528 - DNA, 21 bp, Homo sapiens
attcacaataraaaagtcatg

SEQ ID NO: 16529 - DNA, 21 bp, Homo sapiens
tagtagagctmcagcctagcc

SEQ ID NO: 16530 - DNA, 21 bp, Homo sapiens
cgttacatcaygaaagtatag

SEQ ID NO: 16531 - DNA, 21 bp, Homo sapiens
gagtaatttgktgttaaaata

SEQ ID NO: 16532 - DNA, 21 bp, Homo sapiens
acttttatctrcatggatact

SEQ ID NO: 16533 - DNA, 21 bp, Homo sapiens
acattaaatayaatgttcact

SEQ ID NO: 16534 - DNA, 21 bp, Homo sapiens
agaagaatacrtattctgtgg

SEQ ID NO: 16535 - DNA, 21 bp, Homo sapiens
tgtagaggatktctggtaacc

SEQ ID NO: 16536 - DNA, 21 bp, Homo sapiens
aaagacagaaktatttcttat

SEQ ID NO: 16537 - DNA, 21 bp, Homo sapiens
ttattttgtayttttaagata

SEQ ID NO: 16538 - DNA, 21 bp, Homo sapiens
taagacaagartgaggtgtat

SEQ ID NO: 16539 - DNA, 21 bp, Homo sapiens
aaataatttaraaaattaatt

SEQ ID NO: 16540 - DNA, 21 bp, Homo sapiens
ctctaattggyaggcgcggat

SEQ ID NO: 16541 - DNA, 21 bp, Homo sapiens
ctgaacaattrtaaatgaata

SEQ ID NO: 16542 - DNA, 21 bp, Homo sapiens
ttgaaagactrttctttcctc

SEQ ID NO: 16543 - DNA, 21 bp, Homo sapiens
gtcgcacttasaatcatgttt

SEQ ID NO: 16544 - DNA, 21 bp, Homo sapiens
acttgctttcrgttgccctta

SEQ ID NO: 16545 - DNA, 21 bp, Homo sapiens
taaattttctyttcaaattgt

SEQ ID NO: 16546 - DNA, 21 bp, Homo sapiens
tttcttgtatrtggatgtcta

SEQ ID NO: 16547 - DNA, 21 bp, Homo sapiens
aagatgcagtrcattaggtat

SEQ ID NO: 16548 - DNA, 21 bp, Homo sapiens
aaaaatcttgrgttggctaca

SEQ ID NO: 16549 - DNA, 21 bp, Homo sapiens
ctgacattgcrcatggaatat

SEQ ID NO: 16550 - DNA, 21 bp, Homo sapiens
actttttaacrtgacactagt

SEQ ID NO: 16551 - DNA, 21 bp, Homo sapiens
aaaaatacacrttattgattc

SEQ ID NO: 16552 - DNA, 21 bp, Homo sapiens
ttttgtcttcscagccatatc

SEQ ID NO: 16553 - DNA, 21 bp, Homo sapiens
tcttttatatwcctcagccaa

SEQ ID NO: 16554 - DNA, 21 bp, Homo sapiens
agaagatgaarttactgtgtg

SEQ ID NO: 16555 - DNA, 21 bp, Homo sapiens
tgaaaaggttrctgagttagc

SEQ ID NO: 16556 - DNA, 21 bp, Homo sapiens
tatcaaacatytaaaaaatat

SEQ ID NO: 16557 - DNA, 21 bp, Homo sapiens
taaaaaccaayggcatttaat

SEQ ID NO: 16558 - DNA, 21 bp, Homo sapiens
atatccctcakgtactgcact

SEQ ID NO: 16559 - DNA, 21 bp, Homo sapiens
atgctcctatraggagttcca

SEQ ID NO: 16560 - DNA, 21 bp, Homo sapiens
ttttctctccrcaaacaaaca

SEQ ID NO: 16561 - DNA, 21 bp, Homo sapiens
agagtatgttrttacttttca

SEQ ID NO: 16562 - DNA, 21 bp, Homo sapiens
gctaatatgcrtaagacacag

SEQ ID NO: 16563 - DNA, 21 bp, Homo sapiens
aatgactactstcatttaaaa

SEQ ID NO: 16564 - DNA, 21 bp, Homo sapiens
tgagatgataygcctttgtaa

SEQ ID NO: 16565 - DNA, 21 bp, Homo sapiens
ttttgactaaytgaattttca

SEQ ID NO: 16566 - DNA, 21 bp, Homo sapiens
ggtgataattwttcttaatgc

SEQ ID NO: 16567 - DNA, 21 bp, Homo sapiens
gtccatagaamctagaacaca

SEQ ID NO: 16568 - DNA, 21 bp, Homo sapiens
gctacacataytttttcttaa

SEQ ID NO: 16569 - DNA, 21 bp, Homo sapiens
taattctagtrtttcttaacc

SEQ ID NO: 16570 - DNA, 21 bp, Homo sapiens
ggtaggaggarggagaagagc

SEQ ID NO: 16571 - DNA, 21 bp, Homo sapiens
tggttttcttyatcaagccaa

SEQ ID NO: 16572 - DNA, 21 bp, Homo sapiens
ataattatgaygattatcata

SEQ ID NO: 16573 - DNA, 21 bp, Homo sapiens
accctagggawgtataattct

SEQ ID NO: 16574 - DNA, 21 bp, Homo sapiens
cccttttcatrctaagtttat

SEQ ID NO: 16575 - DNA, 21 bp, Homo sapiens
aaatgagcatrtagcctaaac

SEQ ID NO: 16576 - DNA, 21 bp, Homo sapiens
aaactcctttrttggtttggg

SEQ ID NO: 16577 - DNA, 21 bp, Homo sapiens
gttttatcttwttattaatat

SEQ ID NO: 16578 - DNA, 21 bp, Homo sapiens
aaaataatctkgtggaaaaac

SEQ ID NO: 16579 - DNA, 21 bp, Homo sapiens
tgggacagaarctcctgtgat

SEQ ID NO: 16580 - DNA, 21 bp, Homo sapiens
attcatattargtagtcactt

SEQ ID NO: 16581 - DNA, 21 bp, Homo sapiens
ttctccattcrccagtacatt

SEQ ID NO: 16582 - DNA, 21 bp, Homo sapiens
ttagttttgcktgtcacaact

SEQ ID NO: 16583 - DNA, 21 bp, Homo sapiens
gtaagaggatrcaaagacaag

SEQ ID NO: 16584 - DNA, 21 bp, Homo sapiens
atatcttaaakcatttaaatt

SEQ ID NO: 16585 - DNA, 21 bp, Homo sapiens
tagtcccaaawgtataagctt

SEQ ID NO: 16586 - DNA, 21 bp, Homo sapiens
gactgctctaygggctgctct

SEQ ID NO: 16587 - DNA, 21 bp, Homo sapiens
aggaacatagmataatgtaca

SEQ ID NO: 16588 - DNA, 21 bp, Homo sapiens
tttcttttgckttccagattc

SEQ ID NO: 16589 - DNA, 21 bp, Homo sapiens
tacaaggaacwcagtgtcatt

SEQ ID NO: 16590 - DNA, 21 bp, Homo sapiens
cctgagttagycggctgcctt

SEQ ID NO: 16591 - DNA, 21 bp, Homo sapiens
cagtagactcmtgtttgaagg

SEQ ID NO: 16592 - DNA, 21 bp, Homo sapiens
agacttaaagrccctgccctg

SEQ ID NO: 16593 - DNA, 21 bp, Homo sapiens
tggaacaaagyggactccgag

SEQ ID NO: 16594 - DNA, 21 bp, Homo sapiens
gactaagaaaytttcccagaa

SEQ ID NO: 16595 - DNA, 21 bp, Homo sapiens
aaaagtaattwatctcccttg

SEQ ID NO: 16596 - DNA, 21 bp, Homo sapiens
agtcctagaawgtaagttatt

SEQ ID NO: 16597 - DNA, 21 bp, Homo sapiens
aatatctgctracacttatga

SEQ ID NO: 16598 - DNA, 21 bp, Homo sapiens
aacatcacatytagaatggga

SEQ ID NO: 16599 - DNA, 21 bp, Homo sapiens
gctatttcttstcttctgcta

SEQ ID NO: 16600 - DNA, 21 bp, Homo sapiens
agtttgacttwtacatcttta

SEQ ID NO: 16601 - DNA, 21 bp, Homo sapiens
acaacagcatrtatttgctgt

SEQ ID NO: 16602 - DNA, 21 bp, Homo sapiens
tagaaaactakgccatgcaga

SEQ ID NO: 16603 - DNA, 21 bp, Homo sapiens
tttttttaatrtgagaccgaa

SEQ ID NO: 16604 - DNA, 21 bp, Homo sapiens
gaagttaggcstaaagtttct

SEQ ID NO: 16605 - DNA, 21 bp, Homo sapiens
atttataagamaagaagattt

SEQ ID NO: 16606 - DNA, 21 bp, Homo sapiens
gcccaaatgcyagaaagcagg

SEQ ID NO: 16607 - DNA, 21 bp, Homo sapiens
acattgaacayctattacatc

SEQ ID NO: 16608 - DNA, 21 bp, Homo sapiens
tttccaatatrtgtctttttc

SEQ ID NO: 16609 - DNA, 21 bp, Homo sapiens
catcggatgakggacacctgg

SEQ ID NO: 16610 - DNA, 21 bp, Homo sapiens
tgaccatttcstatgtgccat

SEQ ID NO: 16611 - DNA, 21 bp, Homo sapiens
ataaagtgttrtttccagaaa

SEQ ID NO: 16612 - DNA, 21 bp, Homo sapiens
gtgacagcaakctctaatcac

SEQ ID NO: 16613 - DNA, 21 bp, Homo sapiens
actattctaawccattgattt

SEQ ID NO: 16614 - DNA, 21 bp, Homo sapiens
ttaaagacttmagcatcctca

SEQ ID NO: 16615 - DNA, 21 bp, Homo sapiens
tggtttatttktaggttttaa

SEQ ID NO: 16616 - DNA, 21 bp, Homo sapiens
ttctaatttayagattttatt

SEQ ID NO: 16617 - DNA, 21 bp, Homo sapiens
tgtgcttggcrataaatatac

SEQ ID NO: 16618 - DNA, 21 bp, Homo sapiens
ttaactccaamgctgttttca

SEQ ID NO: 16619 - DNA, 21 bp, Homo sapiens
actgcagaacractatctcca

SEQ ID NO: 16620 - DNA, 21 bp, Homo sapiens
caacatatgarggaaaaggaa

SEQ ID NO: 16621 - DNA, 21 bp, Homo sapiens
gatataacackatgtacgtaa

SEQ ID NO: 16622 - DNA, 21 bp, Homo sapiens
gcattcatgcytgtgccagtg

SEQ ID NO: 16623 - DNA, 21 bp, Homo sapiens
tgtttaggagkttgctgtcaa

SEQ ID NO: 16624 - DNA, 21 bp, Homo sapiens
atgaatgggayaaactaatgt

SEQ ID NO: 16625 - DNA, 21 bp, Homo sapiens
caaaaaagaaraaatttcata

SEQ ID NO: 16626 - DNA, 21 bp, Homo sapiens
cataccatggrtgatcttgtg

SEQ ID NO: 16627 - DNA, 21 bp, Homo sapiens
ttgttttcaartacacacaca

SEQ ID NO: 16628 - DNA, 21 bp, Homo sapiens
gtctaggtcckgctgtttgct

SEQ ID NO: 16629 - DNA, 21 bp, Homo sapiens
acagaggataytactactttc

SEQ ID NO: 16630 - DNA, 21 bp, Homo sapiens
aggagtttttrccaggtagcc

SEQ ID NO: 16631 - DNA, 21 bp, Homo sapiens
cagatcaccayagccatttca

SEQ ID NO: 16632 - DNA, 21 bp, Homo sapiens
tccaattttcrttagttagca

SEQ ID NO: 16633 - DNA, 21 bp, Homo sapiens
atatggatttwaaaaaatgag

SEQ ID NO: 16634 - DNA, 21 bp, Homo sapiens
aaacttgtgaratgcttttta

SEQ ID NO: 16635 - DNA, 21 bp, Homo sapiens
aaaaatttgasataaataaga

SEQ ID NO: 16636 - DNA, 21 bp, Homo sapiens
tataaatgaamaataatatct

SEQ ID NO: 16637 - DNA, 21 bp, Homo sapiens
aaactttacayggctgaaatg

SEQ ID NO: 16638 - DNA, 21 bp, Homo sapiens
atggcagatcmtgtgtctagt

SEQ ID NO: 16639 - DNA, 21 bp, Homo sapiens
cattagtaaaygcctgtagct

SEQ ID NO: 16640 - DNA, 21 bp, Homo sapiens
gatgaaaaggygatacactct

SEQ ID NO: 16641 - DNA, 21 bp, Homo sapiens
agatatgcctstatatccttt

SEQ ID NO: 16642 - DNA, 21 bp, Homo sapiens
aaagagaagarcaaaataact

SEQ ID NO: 16643 - DNA, 21 bp, Homo sapiens
gtcttttaaayaactccagtt

SEQ ID NO: 16644 - DNA, 21 bp, Homo sapiens
ttgtcaatttraacaaaagcc

SEQ ID NO: 16645 - DNA, 21 bp, Homo sapiens
aaatgatccaygatcagtatc

SEQ ID NO: 16646 - DNA, 21 bp, Homo sapiens
agctcccaagrgcaatcaaga

SEQ ID NO: 16647 - DNA, 21 bp, Homo sapiens
attctcacatstttgtcccaa

SEQ ID NO: 16648 - DNA, 21 bp, Homo sapiens
cttactgtgamcctcagagcc

SEQ ID NO: 16649 - DNA, 21 bp, Homo sapiens
aacatcatccktttcccattc

SEQ ID NO: 16650 - DNA, 21 bp, Homo sapiens
gctcagttctrgcggaactta

SEQ ID NO: 16651 - DNA, 21 bp, Homo sapiens
agttttcactraaatttcacc

SEQ ID NO: 16652 - DNA, 21 bp, Homo sapiens
gttttagctarggatctccag

SEQ ID NO: 16653 - DNA, 21 bp, Homo sapiens
aacaggaaatwtgaatctgct

SEQ ID NO: 16654 - DNA, 21 bp, Homo sapiens
agtgaaacagraaagtaatgg

SEQ ID NO: 16655 - DNA, 21 bp, Homo sapiens
ctgtgggtctrtacatttttt

SEQ ID NO: 16656 - DNA, 21 bp, Homo sapiens
tgattggtgcrtctcttctga

SEQ ID NO: 16657 - DNA, 21 bp, Homo sapiens
gtatagccaaytgcttgctaa

SEQ ID NO: 16658 - DNA, 21 bp, Homo sapiens
caaagttaatsactgttaaaa

SEQ ID NO: 16659 - DNA, 21 bp, Homo sapiens
tcatatagctrttaggtacac

SEQ ID NO: 16660 - DNA, 21 bp, Homo sapiens
ggatcagaacytctttctccc

SEQ ID NO: 16661 - DNA, 21 bp, Homo sapiens
agttcattatrctacaaatga

SEQ ID NO: 16662 - DNA, 21 bp, Homo sapiens
tactaaagtawtaggtgatca

SEQ ID NO: 16663 - DNA, 21 bp, Homo sapiens
tttcttcacaratgatattgt

SEQ ID NO: 16664 - DNA, 21 bp, Homo sapiens
tgaagtagccyttaattctgt

SEQ ID NO: 16665 - DNA, 21 bp, Homo sapiens
ttaaaatttckttctaaatat

SEQ ID NO: 16666 - DNA, 21 bp, Homo sapiens
ttttccaaggyatttcttcac

SEQ ID NO: 16667 - DNA, 21 bp, Homo sapiens
tttatctgttratcttaaata

SEQ ID NO: 16668 - DNA, 21 bp, Homo sapiens
ggaccttaggyttagattctc

SEQ ID NO: 16669 - DNA, 21 bp, Homo sapiens
tttcttctttygtgagctttt

SEQ ID NO: 16670 - DNA, 21 bp, Homo sapiens
ctgcatattcrcaactggtga

SEQ ID NO: 16671 - DNA, 21 bp, Homo sapiens
cacagaattartcttgttctc

SEQ ID NO: 16672 - DNA, 21 bp, Homo sapiens
caatagctgcwaataaaataa

SEQ ID NO: 16673 - DNA, 21 bp, Homo sapiens
agttgcttgtrctaacattca

SEQ ID NO: 16674 - DNA, 21 bp, Homo sapiens
cccctgaaatytgtgctcaga

SEQ ID NO: 16675 - DNA, 21 bp, Homo sapiens
aggcagtcttytgaaaataca

SEQ ID NO: 16676 - DNA, 21 bp, Homo sapiens
ggttgtcagcwttgggaaggc

SEQ ID NO: 16677 - DNA, 21 bp, Homo sapiens
gtaaaatagargaaaaaggaa

SEQ ID NO: 16678 - DNA, 21 bp, Homo sapiens
agtggattctrgggaagcatc

SEQ ID NO: 16679 - DNA, 21 bp, Homo sapiens
taaaactcccrtcgcgtactt

SEQ ID NO: 16680 - DNA, 21 bp, Homo sapiens
tgaaatatatmagaaatataa

SEQ ID NO: 16681 - DNA, 21 bp, Homo sapiens
gaggagggagragaatataag

SEQ ID NO: 16682 - DNA, 21 bp, Homo sapiens
attattttackgaacaattct

SEQ ID NO: 16683 - DNA, 21 bp, Homo sapiens
aactaattctrtaagtagatc

SEQ ID NO: 16684 - DNA, 21 bp, Homo sapiens
ccagagaacascaaatgtcac

SEQ ID NO: 16685 - DNA, 21 bp, Homo sapiens
gctgtagagtytttacaaaca

SEQ ID NO: 16686 - DNA, 21 bp, Homo sapiens
gaagaagcaargctataaacc

SEQ ID NO: 16687 - DNA, 21 bp, Homo sapiens
ctaaaattaawccagcttctt

SEQ ID NO: 16688 - DNA, 21 bp, Homo sapiens
tgactttgctsggggaagtgc

SEQ ID NO: 16689 - DNA, 21 bp, Homo sapiens
ctgtcactgayggtgagcaat

SEQ ID NO: 16690 - DNA, 21 bp, Homo sapiens
ttacatcgggrttatggattt

SEQ ID NO: 16691 - DNA, 21 bp, Homo sapiens
gttagaacttrtttattaagc

SEQ ID NO: 16692 - DNA, 21 bp, Homo sapiens
ttggtgtactyatactatgaa

SEQ ID NO: 16693 - DNA, 21 bp, Homo sapiens
actaaaaagayagaaaagggt

SEQ ID NO: 16694 - DNA, 21 bp, Homo sapiens
agggtacatgwgggtgtcgac

SEQ ID NO: 16695 - DNA, 21 bp, Homo sapiens
atatattttcycattttgtga

SEQ ID NO: 16696 - DNA, 21 bp, Homo sapiens
ctagcaggtcstgagaattgt

SEQ ID NO: 16697 - DNA, 21 bp, Homo sapiens
tctttaccaaygctgatatcc

SEQ ID NO: 16698 - DNA, 21 bp, Homo sapiens
ttatgatagcyatgatgtcac

SEQ ID NO: 16699 - DNA, 21 bp, Homo sapiens
atatttttctrctgcttgtag

SEQ ID NO: 16700 - DNA, 21 bp, Homo sapiens
tgacatctttrtctggtttgg

SEQ ID NO: 16701 - DNA, 21 bp, Homo sapiens
gatattttagytcccctgggg

SEQ ID NO: 16702 - DNA, 21 bp, Homo sapiens
atgcaactcastcaaaaagga

SEQ ID NO: 16703 - DNA, 21 bp, Homo sapiens
gaacactgtakatattttgac

SEQ ID NO: 16704 - DNA, 21 bp, Homo sapiens
ccttttatagmctcagctaga

SEQ ID NO: 16705 - DNA, 21 bp, Homo sapiens
agctctgattrtggtgctggg

SEQ ID NO: 16706 - DNA, 21 bp, Homo sapiens
cattcataggstcttacgatt

SEQ ID NO: 16707 - DNA, 21 bp, Homo sapiens
tttttttttakcatccttcac

SEQ ID NO: 16708 - DNA, 21 bp, Homo sapiens
caatctgccarttttcaccgt

SEQ ID NO: 16709 - DNA, 21 bp, Homo sapiens
cccttcgcagwagcaggaaac

SEQ ID NO: 16710 - DNA, 21 bp, Homo sapiens
tttaatttaargctctggcaa

SEQ ID NO: 16711 - DNA, 21 bp, Homo sapiens
aggctttactscttgtcaccc

SEQ ID NO: 16712 - DNA, 21 bp, Homo sapiens
ttcttcccttstatttcatgt

SEQ ID NO: 16713 - DNA, 21 bp, Homo sapiens
tataattttcycaccttgggt

SEQ ID NO: 16714 - DNA, 21 bp, Homo sapiens
cattagcttargctcagcatg

SEQ ID NO: 16715 - DNA, 21 bp, Homo sapiens
agcaaatctcyaccatgattc

SEQ ID NO: 16716 - DNA, 21 bp, Homo sapiens
tttcatcaaakgaagagcagt

SEQ ID NO: 16717 - DNA, 21 bp, Homo sapiens
aggggattgaytggaaaagaa

SEQ ID NO: 16718 - DNA, 21 bp, Homo sapiens
ggatgggaaaraaatccaatt

SEQ ID NO: 16719 - DNA, 21 bp, Homo sapiens
tcttctctccrtctaaactac

SEQ ID NO: 16720 - DNA, 21 bp, Homo sapiens
tgttcgaggargagcacagtg

SEQ ID NO: 16721 - DNA, 21 bp, Homo sapiens
tatcccagaartatgttgaag

SEQ ID NO: 16722 - DNA, 21 bp, Homo sapiens
atgtggcttamtttaaaggaa

SEQ ID NO: 16723 - DNA, 21 bp, Homo sapiens
gtgctatgaayggttttacat

SEQ ID NO: 16724 - DNA, 21 bp, Homo sapiens
gagcttactcwaaaatgaagg

SEQ ID NO: 16725 - DNA, 21 bp, Homo sapiens
tcatttcagayaagcaaatgt

SEQ ID NO: 16726 - DNA, 21 bp, Homo sapiens
caccaggaccyacctgcaggt

SEQ ID NO: 16727 - DNA, 21 bp, Homo sapiens
ccgcattaacrgaaagaagga

SEQ ID NO: 16728 - DNA, 21 bp, Homo sapiens
agagttttcaygaatatgcat

SEQ ID NO: 16729 - DNA, 21 bp, Homo sapiens
tacataggagmaagatcatcc

SEQ ID NO: 16730 - DNA, 21 bp, Homo sapiens
gtaaagtctakgcctatagct

SEQ ID NO: 16731 - DNA, 21 bp, Homo sapiens
ataatacaaastctacatctt

SEQ ID NO: 16732 - DNA, 21 bp, Homo sapiens
cacacagatgyagcacaaaca

SEQ ID NO: 16733 - DNA, 21 bp, Homo sapiens
atattttttayaactcaatta

SEQ ID NO: 16734 - DNA, 21 bp, Homo sapiens
gtagtgaagtmaactgcagtc

SEQ ID NO: 16735 - DNA, 21 bp, Homo sapiens
gagggtttggrgcttataccc

SEQ ID NO: 16736 - DNA, 21 bp, Homo sapiens
atacgtttgasctactcaatt

SEQ ID NO: 16737 - DNA, 21 bp, Homo sapiens
taggaatatcrtcttttctgc

SEQ ID NO: 16738 - DNA, 21 bp, Homo sapiens
gaaattgccawgaataattac

SEQ ID NO: 16739 - DNA, 21 bp, Homo sapiens
ttgatgggctrttgggttaga

SEQ ID NO: 16740 - DNA, 21 bp, Homo sapiens
ttcttaagcawccctataaaa

SEQ ID NO: 16741 - DNA, 21 bp, Homo sapiens
cacacacatamactactgtcc

SEQ ID NO: 16742 - DNA, 21 bp, Homo sapiens
tttcactctgyatagattcac

SEQ ID NO: 16743 - DNA, 21 bp, Homo sapiens
atattttactytagtggctag

SEQ ID NO: 16744 - DNA, 21 bp, Homo sapiens
acagaatatcrtaaaatattg

SEQ ID NO: 16745 - DNA, 21 bp, Homo sapiens
agggaacagaygtttgtaccc

SEQ ID NO: 16746 - DNA, 21 bp, Homo sapiens
ttttggggggktatatggtag

SEQ ID NO: 16747 - DNA, 21 bp, Homo sapiens
tcctcaggagraagactcttt

SEQ ID NO: 16748 - DNA, 21 bp, Homo sapiens
ctcatctacarttctactgca

SEQ ID NO: 16749 - DNA, 21 bp, Homo sapiens
ccttctaccaygtccctattc

SEQ ID NO: 16750 - DNA, 21 bp, Homo sapiens
agagacagtcyatttaaagta

SEQ ID NO: 16751 - DNA, 21 bp, Homo sapiens
caagtcttcartttaaaaatc

SEQ ID NO: 16752 - DNA, 21 bp, Homo sapiens
gggcttctttsaagaagcaca

SEQ ID NO: 16753 - DNA, 21 bp, Homo sapiens
cacttgtgggrtgtgaagatg

SEQ ID NO: 16754 - DNA, 21 bp, Homo sapiens
atcagaaaagkccaatggata

SEQ ID NO: 16755 - DNA, 21 bp, Homo sapiens
aatgcagacayaaaagaatag

SEQ ID NO: 16756 - DNA, 21 bp, Homo sapiens
tcttatgagtrtgataactgt

SEQ ID NO: 16757 - DNA, 21 bp, Homo sapiens
agtaaattcayttttgtacat

SEQ ID NO: 16758 - DNA, 21 bp, Homo sapiens
tcccaagaacrtttatatttg

SEQ ID NO: 16759 - DNA, 21 bp, Homo sapiens
tctcatttacrctgtgtgaat

SEQ ID NO: 16760 - DNA, 21 bp, Homo sapiens
aaatgtaatgraagactagag

SEQ ID NO: 16761 - DNA, 21 bp, Homo sapiens
tttatttgttrattactgatg

SEQ ID NO: 16762 - DNA, 21 bp, Homo sapiens
tagaattatgktgacaccatg

SEQ ID NO: 16763 - DNA, 21 bp, Homo sapiens
ttcaggtcaayacaagtcact

SEQ ID NO: 16764 - DNA, 21 bp, Homo sapiens
tggaggaaaakgctctggtag

SEQ ID NO: 16765 - DNA, 21 bp, Homo sapiens
gtatttacaakgaatgttttc

SEQ ID NO: 16766 - DNA, 21 bp, Homo sapiens
tttgtcattarcagatctctg

SEQ ID NO: 16767 - DNA, 21 bp, Homo sapiens
tacgcgttacraagaagttct

SEQ ID NO: 16768 - DNA, 21 bp, Homo sapiens
ctccagagagwctatgtcatc

SEQ ID NO: 16769 - DNA, 21 bp, Homo sapiens
tttcggtgggrtcagtggtaa

SEQ ID NO: 16770 - DNA, 21 bp, Homo sapiens
gtctcctcaaktttaggactc

SEQ ID NO: 16771 - DNA, 21 bp, Homo sapiens
cccactcttcytttatgaaac

SEQ ID NO: 16772 - DNA, 21 bp, Homo sapiens
gaactgactaygtatttagaa

SEQ ID NO: 16773 - DNA, 21 bp, Homo sapiens
gctctctgtayaaccatgttg

SEQ ID NO: 16774 - DNA, 21 bp, Homo sapiens
aatccttgtasagtacatgac

SEQ ID NO: 16775 - DNA, 21 bp, Homo sapiens
aacacatagcwatctctcttt

SEQ ID NO: 16776 - DNA, 21 bp, Homo sapiens
aaggcattttscttattgact

SEQ ID NO: 16777 - DNA, 21 bp, Homo sapiens
aatttccaacwcatgaaattt

SEQ ID NO: 16778 - DNA, 21 bp, Homo sapiens
ggcaagtgatrgataaaaaat

SEQ ID NO: 16779 - DNA, 21 bp, Homo sapiens
agaggccacckcatttcttgg

SEQ ID NO: 16780 - DNA, 21 bp, Homo sapiens
atcatagtcaytcctcatagt

SEQ ID NO: 16781 - DNA, 21 bp, Homo sapiens
cttagagttgsgattacagcc

SEQ ID NO: 16782 - DNA, 21 bp, Homo sapiens
gtagaggaggracccctgtct

SEQ ID NO: 16783 - DNA, 21 bp, Homo sapiens
gcatgtgaaayagtttcatct

SEQ ID NO: 16784 - DNA, 21 bp, Homo sapiens
tggtacaagtrgtggtagaga

SEQ ID NO: 16785 - DNA, 21 bp, Homo sapiens
ttcactagaargaaaaatatt

SEQ ID NO: 16786 - DNA, 21 bp, Homo sapiens
ctatattccaygaggaaagac

SEQ ID NO: 16787 - DNA, 21 bp, Homo sapiens
aacagtcaaaytttggtcaat

SEQ ID NO: 16788 - DNA, 21 bp, Homo sapiens
gttttacacaraacttaacca

SEQ ID NO: 16789 - DNA, 21 bp, Homo sapiens
cttccttctaycttaacaccg

SEQ ID NO: 16790 - DNA, 21 bp, Homo sapiens
tgtataaaagraagtctttat

SEQ ID NO: 16791 - DNA, 21 bp, Homo sapiens
attattgactyagagacagcc

SEQ ID NO: 16792 - DNA, 21 bp, Homo sapiens
taccaactcayacagaaagta

SEQ ID NO: 16793 - DNA, 21 bp, Homo sapiens
cttcatgatawccccaataac

SEQ ID NO: 16794 - DNA, 21 bp, Homo sapiens
tatttttactyccaataattg

SEQ ID NO: 16795 - DNA, 21 bp, Homo sapiens
tgagtgcttaraaacacctta

SEQ ID NO: 16796 - DNA, 21 bp, Homo sapiens
aataaaatgtyttaacaaaga

SEQ ID NO: 16797 - DNA, 21 bp, Homo sapiens
caatgaggtgyaaagcccttt

SEQ ID NO: 16798 - DNA, 21 bp, Homo sapiens
tagggtaactraaagataggg

SEQ ID NO: 16799 - DNA, 21 bp, Homo sapiens
aatataagtgsagagcttatt

SEQ ID NO: 16800 - DNA, 21 bp, Homo sapiens
tgtgtcctcgmcctctcccgt

SEQ ID NO: 16801 - DNA, 21 bp, Homo sapiens
atccaggaagycctcaaagct

SEQ ID NO: 16802 - DNA, 21 bp, Homo sapiens
ctagggtatasgcccatccca

SEQ ID NO: 16803 - DNA, 21 bp, Homo sapiens
tcttccacatsattcaaacga

SEQ ID NO: 16804 - DNA, 21 bp, Homo sapiens
aaggatctcayggcagaaggg

SEQ ID NO: 16805 - DNA, 21 bp, Homo sapiens
tgggccagggmctgacttgga

SEQ ID NO: 16806 - DNA, 21 bp, Homo sapiens
tcagccctcayaggggtccga

SEQ ID NO: 16807 - DNA, 21 bp, Homo sapiens
gattttgcgtycaaagtgata

SEQ ID NO: 16808 - DNA, 21 bp, Homo sapiens
ggtgtcttccwcccccatgca

SEQ ID NO: 16809 - DNA, 21 bp, Homo sapiens
gacagactgcrctgtctcact

SEQ ID NO: 16810 - DNA, 21 bp, Homo sapiens
cggatcttcayatatgaggag

SEQ ID NO: 16811 - DNA, 21 bp, Homo sapiens
atgtggggctrgccaaagatg

SEQ ID NO: 16812 - DNA, 21 bp, Homo sapiens
cggcccggggmtggaggccat

SEQ ID NO: 16813 - DNA, 21 bp, Homo sapiens
aggctctttgyttatgccagg

SEQ ID NO: 16814 - DNA, 21 bp, Homo sapiens
ctgccgctggwtcctgaccct

SEQ ID NO: 16815 - DNA, 21 bp, Homo sapiens
ctggtgatctstttcatcctc

SEQ ID NO: 16816 - DNA, 21 bp, Homo sapiens
aactgggcctrcggctttggg

SEQ ID NO: 16817 - DNA, 21 bp, Homo sapiens
agggtaagggyccaaagtcaa

SEQ ID NO: 16818 - DNA, 21 bp, Homo sapiens
ggggacagtgycaaagatgcg

SEQ ID NO: 16819 - DNA, 21 bp, Homo sapiens
actgcccagawccctgctgat

SEQ ID NO: 16820 - DNA, 21 bp, Homo sapiens
gagttcatggycctgccccct

SEQ ID NO: 16821 - DNA, 21 bp, Homo sapiens
actattcaagratacttgtgg

SEQ ID NO: 16822 - DNA, 21 bp, Homo sapiens
aggatggaacyggggcggcag

SEQ ID NO: 16823 - DNA, 21 bp, Homo sapiens
aaaaaaaaagkggcaccaaat

SEQ ID NO: 16824 - DNA, 21 bp, Homo sapiens
tgttcataaayacggttaagt

SEQ ID NO: 16825 - DNA, 21 bp, Homo sapiens
aagtgtgggayacggaagatc

SEQ ID NO: 16826 - DNA, 21 bp, Homo sapiens
cctacctgtcytgtgcaactg

SEQ ID NO: 16827 - DNA, 21 bp, Homo sapiens
atttattgtcyttttaatatc

SEQ ID NO: 16828 - DNA, 21 bp, Homo sapiens
ggatggatatrtaggagagaa

SEQ ID NO: 16829 - DNA, 21 bp, Homo sapiens
gacttcttttrccagctaaag

SEQ ID NO: 16830 - DNA, 21 bp, Homo sapiens
tcaagggatcyaaaggtaggg

SEQ ID NO: 16831 - DNA, 21 bp, Homo sapiens
ctattttatgrctcttcttca

SEQ ID NO: 16832 - DNA, 21 bp, Homo sapiens
ctttactttgyatttctttgg

SEQ ID NO: 16833 - DNA, 21 bp, Homo sapiens
tccaccctacrtttaggccca

SEQ ID NO: 16834 - DNA, 21 bp, Homo sapiens
gcccttggcakccacttacca

SEQ ID NO: 16835 - DNA, 21 bp, Homo sapiens
tgatgacttckgcttagaagt

SEQ ID NO: 16836 - DNA, 21 bp, Homo sapiens
atataaaattrcccactcctc

SEQ ID NO: 16837 - DNA, 21 bp, Homo sapiens
gtaacatagcrtagataatat

SEQ ID NO: 16838 - DNA, 21 bp, Homo sapiens
aggaacaaggrcatatgttaa

SEQ ID NO: 16839 - DNA, 21 bp, Homo sapiens
cttctgtttcraggttggagt

SEQ ID NO: 16840 - DNA, 21 bp, Homo sapiens
ccgagaaacaytggggtgttt

SEQ ID NO: 16841 - DNA, 21 bp, Homo sapiens
tcctttttgtycgttgagatc

SEQ ID NO: 16842 - DNA, 21 bp, Homo sapiens
acaggagggtraaataaaacc

SEQ ID NO: 16843 - DNA, 21 bp, Homo sapiens
gctggatctcyacatcatatg

SEQ ID NO: 16844 - DNA, 21 bp, Homo sapiens
gtctgtatacytatggcggat

SEQ ID NO: 16845 - DNA, 21 bp, Homo sapiens
tgcaaagaacrtagacttatc

SEQ ID NO: 16846 - DNA, 21 bp, Homo sapiens
ataaaagtaayatgtgctcat

SEQ ID NO: 16847 - DNA, 21 bp, Homo sapiens
ttgatcaagcratttagtaag

SEQ ID NO: 16848 - DNA, 21 bp, Homo sapiens
ccctttgtttytgaatgaaat

SEQ ID NO: 16849 - DNA, 21 bp, Homo sapiens
ttaaaacttamcatcttgatt

SEQ ID NO: 16850 - DNA, 21 bp, Homo sapiens
tttcggtgatktttctaggct

SEQ ID NO: 16851 - DNA, 21 bp, Homo sapiens
tcaccacccaragatatcaca

SEQ ID NO: 16852 - DNA, 21 bp, Homo sapiens
tcctttctaaytgctgtcctc

SEQ ID NO: 16853 - DNA, 21 bp, Homo sapiens
agaacgtcttygttgacagat

SEQ ID NO: 16854 - DNA, 21 bp, Homo sapiens
tttagccagcrctttatacca

SEQ ID NO: 16855 - DNA, 21 bp, Homo sapiens
gaagcgacgcrgagagggctc

SEQ ID NO: 16856 - DNA, 21 bp, Homo sapiens
aaatacattgyagaaagtcat

SEQ ID NO: 16857 - DNA, 21 bp, Homo sapiens
taagtcactaytgaaatggca

SEQ ID NO: 16858 - DNA, 21 bp, Homo sapiens
tttctcccagytggtttctgc

SEQ ID NO: 16859 - DNA, 21 bp, Homo sapiens
tcaagactgcraagtggtgaa

SEQ ID NO: 16860 - DNA, 21 bp, Homo sapiens
agggccagggragatcatgcc

SEQ ID NO: 16861 - DNA, 21 bp, Homo sapiens
caacatactcrcagactgcct

SEQ ID NO: 16862 - DNA, 21 bp, Homo sapiens
cgctttttctsgagaggtctt

SEQ ID NO: 16863 - DNA, 21 bp, Homo sapiens
taggaagtgayggtgctccgg

SEQ ID NO: 16864 - DNA, 21 bp, Homo sapiens
gtcccaaatgyatgtgagctg

SEQ ID NO: 16865 - DNA, 21 bp, Homo sapiens
ggtgctaattrcccagaatgg

SEQ ID NO: 16866 - DNA, 21 bp, Homo sapiens
atgttggtcawtttggatatc

SEQ ID NO: 16867 - DNA, 21 bp, Homo sapiens
cagatagctcwgcctcactgt

SEQ ID NO: 16868 - DNA, 21 bp, Homo sapiens
agaatgagggytttgggggct

SEQ ID NO: 16869 - DNA, 21 bp, Homo sapiens
aaagacacacrggcagctagt

SEQ ID NO: 16870 - DNA, 21 bp, Homo sapiens
ttgctttattmtcagtttaga

SEQ ID NO: 16871 - DNA, 21 bp, Homo sapiens
ttccaagactytctgtgttat

SEQ ID NO: 16872 - DNA, 21 bp, Homo sapiens
agggaatgatrtcttccacaa

SEQ ID NO: 16873 - DNA, 21 bp, Homo sapiens
gactttcatgyatccattggg

SEQ ID NO: 16874 - DNA, 21 bp, Homo sapiens
tgccttcaatraacttaacaa

SEQ ID NO: 16875 - DNA, 21 bp, Homo sapiens
cattattgccrtgaatgtttg

SEQ ID NO: 16876 - DNA, 21 bp, Homo sapiens
tgcagcggctwcaggtgtggg

SEQ ID NO: 16877 - DNA, 21 bp, Homo sapiens
ggagatgttcytttccattgg

SEQ ID NO: 16878 - DNA, 21 bp, Homo sapiens
agaatcaagascctttggtga

SEQ ID NO: 16879 - DNA, 21 bp, Homo sapiens
gctatacttgscatgtgtatc

SEQ ID NO: 16880 - DNA, 21 bp, Homo sapiens
tgcactcaggrccaacacctg

SEQ ID NO: 16881 - DNA, 21 bp, Homo sapiens
gagaatttggktctaaggttg

SEQ ID NO: 16882 - DNA, 21 bp, Homo sapiens
tcagggtcaayatcaagctct

SEQ ID NO: 16883 - DNA, 21 bp, Homo sapiens
tctttcctctytcctcaccaa

SEQ ID NO: 16884 - DNA, 21 bp, Homo sapiens
caagaggctcrcagggagagg

SEQ ID NO: 16885 - DNA, 21 bp, Homo sapiens
ccaagctcacyctattccatg

SEQ ID NO: 16886 - DNA, 21 bp, Homo sapiens
atggcatagastagtgctgtg

SEQ ID NO: 16887 - DNA, 21 bp, Homo sapiens
agaagggatargattatttgc

SEQ ID NO: 16888 - DNA, 21 bp, Homo sapiens
gggaataataraacctatctc

SEQ ID NO: 16889 - DNA, 21 bp, Homo sapiens
agtgatttagsttcagatagt

SEQ ID NO: 16890 - DNA, 21 bp, Homo sapiens
aaatattttgycactgtcact

SEQ ID NO: 16891 - DNA, 21 bp, Homo sapiens
cttgatcctaytgctttttct

SEQ ID NO: 16892 - DNA, 21 bp, Homo sapiens
ttcctttgccwtgctggttgt

SEQ ID NO: 16893 - DNA, 21 bp, Homo sapiens
aatatgcccawcctgggagcc

SEQ ID NO: 16894 - DNA, 21 bp, Homo sapiens
ggaaagagatwgagtaaaacc

SEQ ID NO: 16895 - DNA, 21 bp, Homo sapiens
tgcgagcgtgsatgcaagtca

SEQ ID NO: 16896 - DNA, 21 bp, Homo sapiens
gccttaacacrccaaaagttt

SEQ ID NO: 16897 - DNA, 21 bp, Homo sapiens
cagagtagatkgaggatcatt

SEQ ID NO: 16898 - DNA, 21 bp, Homo sapiens
gctttaaaagstgagaaaatt

SEQ ID NO: 16899 - DNA, 21 bp, Homo sapiens
gcaggaatgartaccacgcgg

SEQ ID NO: 16900 - DNA, 21 bp, Homo sapiens
gggaaagagawttttttttaa

SEQ ID NO: 16901 - DNA, 21 bp, Homo sapiens
ttttcagtccyaatgacacgc

SEQ ID NO: 16902 - DNA, 21 bp, Homo sapiens
ctggcattttygccggggata

SEQ ID NO: 16903 - DNA, 21 bp, Homo sapiens
ccaagaaggarcatgatccca

SEQ ID NO: 16904 - DNA, 21 bp, Homo sapiens
ggcctgggacmggcctacaag

SEQ ID NO: 16905 - DNA, 21 bp, Homo sapiens
ggagtagaccwgtgtccaggc

SEQ ID NO: 16906 - DNA, 21 bp, Homo sapiens
gtttgtttccmaggctgatat

SEQ ID NO: 16907 - DNA, 21 bp, Homo sapiens
tctgcagtcaytatctatgct

SEQ ID NO: 16908 - DNA, 21 bp, Homo sapiens
gggcccctctyggggctatga

SEQ ID NO: 16909 - DNA, 21 bp, Homo sapiens
aggaagaagayggaacttcat

SEQ ID NO: 16910 - DNA, 21 bp, Homo sapiens
aaagactgaakctgtgtaggg

SEQ ID NO: 16911 - DNA, 21 bp, Homo sapiens
ttattctgctytaagcatgag

SEQ ID NO: 16912 - DNA, 21 bp, Homo sapiens
gattgcagcawcttttgctgt

SEQ ID NO: 16913 - DNA, 21 bp, Homo sapiens
cccaatcagakgcccatagct

SEQ ID NO: 16914 - DNA, 21 bp, Homo sapiens
gaatgacagcrcgtgggaaaa

SEQ ID NO: 16915 - DNA, 21 bp, Homo sapiens
ttaaataaatytgacaggaaa

SEQ ID NO: 16916 - DNA, 21 bp, Homo sapiens
aggtaacagcytgaaggtgaa

SEQ ID NO: 16917 - DNA, 21 bp, Homo sapiens
ccctttgggtktttgactttt

SEQ ID NO: 16918 - DNA, 21 bp, Homo sapiens
tgtcaataggyaactctcctt

SEQ ID NO: 16919 - DNA, 21 bp, Homo sapiens
caggtacttcktcagtgggat

SEQ ID NO: 16920 - DNA, 21 bp, Homo sapiens
gtcatgattcwtgccttgagg

SEQ ID NO: 16921 - DNA, 21 bp, Homo sapiens
atattctgctrttctgggctc

SEQ ID NO: 16922 - DNA, 21 bp, Homo sapiens
ttggtcacagytggtgctcta

SEQ ID NO: 16923 - DNA, 21 bp, Homo sapiens
aggagcctgaygaggtatgtg

SEQ ID NO: 16924 - DNA, 21 bp, Homo sapiens
tcactctccartatggttttt

SEQ ID NO: 16925 - DNA, 21 bp, Homo sapiens
tgacccccacrctagtcatca

SEQ ID NO: 16926 - DNA, 21 bp, Homo sapiens
gctactgttcrctagaaatga

SEQ ID NO: 16927 - DNA, 21 bp, Homo sapiens
atgcttcttcwttagccattc

SEQ ID NO: 16928 - DNA, 21 bp, Homo sapiens
catgtgaatarccttcagtta

SEQ ID NO: 16929 - DNA, 21 bp, Homo sapiens
aaaccagatcwcatgcaattg

SEQ ID NO: 16930 - DNA, 21 bp, Homo sapiens
ttactccaaaygaacctttaa

SEQ ID NO: 16931 - DNA, 21 bp, Homo sapiens
ttaaagccaargtgttttaaa

SEQ ID NO: 16932 - DNA, 21 bp, Homo sapiens
agcagtggccrttgcagaggc

SEQ ID NO: 16933 - DNA, 21 bp, Homo sapiens
tctcctctagrgttatagagt

SEQ ID NO: 16934 - DNA, 21 bp, Homo sapiens
gaaaagaaaaktatagaccag

SEQ ID NO: 16935 - DNA, 21 bp, Homo sapiens
acttttctaaycacagtttat

SEQ ID NO: 16936 - DNA, 21 bp, Homo sapiens
atcatcaagayagggtctgta

SEQ ID NO: 16937 - DNA, 21 bp, Homo sapiens
agcatggacaytttagcaaat

SEQ ID NO: 16938 - DNA, 21 bp, Homo sapiens
gataggggcaygtcaaaagga

SEQ ID NO: 16939 - DNA, 21 bp, Homo sapiens
aattactatgraccacaagta

SEQ ID NO: 16940 - DNA, 21 bp, Homo sapiens
ctgtatatgcrgatgtggtag

SEQ ID NO: 16941 - DNA, 21 bp, Homo sapiens
acattataccraaagcaaaat

SEQ ID NO: 16942 - DNA, 21 bp, Homo sapiens
ggtcttactgyttgtgttact

SEQ ID NO: 16943 - DNA, 21 bp, Homo sapiens
gctaaagtcarataggtggga

SEQ ID NO: 16944 - DNA, 21 bp, Homo sapiens
atatgtgaaargaacaacatt

SEQ ID NO: 16945 - DNA, 21 bp, Homo sapiens
aggcctggcaraatgtgattt

SEQ ID NO: 16946 - DNA, 21 bp, Homo sapiens
aatttttaaartaataaatta

SEQ ID NO: 16947 - DNA, 21 bp, Homo sapiens
tgctgcatatscacttttgtt

SEQ ID NO: 16948 - DNA, 21 bp, Homo sapiens
atcttcacatytaaagctgta

SEQ ID NO: 16949 - DNA, 21 bp, Homo sapiens
ctggtagtggygtaatgcatg

SEQ ID NO: 16950 - DNA, 21 bp, Homo sapiens
aaatcaccatrgtacataata

SEQ ID NO: 16951 - DNA, 21 bp, Homo sapiens
tttaaaagaarctagcaatat

SEQ ID NO: 16952 - DNA, 21 bp, Homo sapiens
taataccaagyaggaacattc

SEQ ID NO: 16953 - DNA, 21 bp, Homo sapiens
cacactgaaasgcaagaaagg

SEQ ID NO: 16954 - DNA, 21 bp, Homo sapiens
tgaaaatccayacattattat

SEQ ID NO: 16955 - DNA, 21 bp, Homo sapiens
gacattttctrttagctaaaa

SEQ ID NO: 16956 - DNA, 21 bp, Homo sapiens
acacaacaaarcatccagagg

SEQ ID NO: 16957 - DNA, 21 bp, Homo sapiens
gtcctgagctkagttagggct

SEQ ID NO: 16958 - DNA, 21 bp, Homo sapiens
ttgatgtaaayagaacccaat

SEQ ID NO: 16959 - DNA, 21 bp, Homo sapiens
ggccaaaagtrgaaattaaca

SEQ ID NO: 16960 - DNA, 21 bp, Homo sapiens
agaaactaatrcaaatttaat

SEQ ID NO: 16961 - DNA, 21 bp, Homo sapiens
ccttctcatayacttactcct

SEQ ID NO: 16962 - DNA, 21 bp, Homo sapiens
ataaacactckgttttcaact

SEQ ID NO: 16963 - DNA, 21 bp, Homo sapiens
atgagagaacrtctgttgctt

SEQ ID NO: 16964 - DNA, 21 bp, Homo sapiens
aaccaatgtcrgaatttaaca

SEQ ID NO: 16965 - DNA, 21 bp, Homo sapiens
ggactctcctkttgtcaggtt

SEQ ID NO: 16966 - DNA, 21 bp, Homo sapiens
ggcgttgcatrcctgttgctt

SEQ ID NO: 16967 - DNA, 21 bp, Homo sapiens
tgaatgcctgrcacagtgcac

SEQ ID NO: 16968 - DNA, 21 bp, Homo sapiens
aagaagaaatrtcagaactga

SEQ ID NO: 16969 - DNA, 21 bp, Homo sapiens
ggccctgctcyggcgccaggc

SEQ ID NO: 16970 - DNA, 21 bp, Homo sapiens
ggaagaatacygcttggccct

SEQ ID NO: 16971 - DNA, 21 bp, Homo sapiens
gctttctgggkttactgagtt

SEQ ID NO: 16972 - DNA, 21 bp, Homo sapiens
atgcctttaarttgcccctct

SEQ ID NO: 16973 - DNA, 21 bp, Homo sapiens
gcgctcttgtrcaacaggtaa

SEQ ID NO: 16974 - DNA, 21 bp, Homo sapiens
cagattctggsgcaacagagt

SEQ ID NO: 16975 - DNA, 21 bp, Homo sapiens
agaggacactygagtctttct

SEQ ID NO: 16976 - DNA, 21 bp, Homo sapiens
tagtagcacaktaacacttgc

SEQ ID NO: 16977 - DNA, 21 bp, Homo sapiens
ttttattagargactgtgtta

SEQ ID NO: 16978 - DNA, 21 bp, Homo sapiens
ttatgctttarcatgtgaatg

SEQ ID NO: 16979 - DNA, 21 bp, Homo sapiens
tgaatgtttckttttaagtga

SEQ ID NO: 16980 - DNA, 21 bp, Homo sapiens
ttctcaagtcytagattctga

SEQ ID NO: 16981 - DNA, 21 bp, Homo sapiens
taagataagcmcttatatcat

SEQ ID NO: 16982 - DNA, 21 bp, Homo sapiens
taacaaactgycacaaaagct

SEQ ID NO: 16983 - DNA, 21 bp, Homo sapiens
aatattttcaygaattttaca

SEQ ID NO: 16984 - DNA, 21 bp, Homo sapiens
tgtacggccaygttttatata
